(19) United States
(12) Patent Application Publication
(10) Pub. No.: US 2025/0281611 A1
(43) Pub. Date: Sep. 11, 2025

(54) NOVEL CELL THERAPY SYSTEM

(71) Applicant: BIOSCEPTRE ( AUST ) PTY LTD, North Ryde (AU)

(72) Inventors: Patrick Schlegel, Sydney (AU); Julian Alexander Barden, Sydney (AU); Ziduo Li, Sydney (AU); Sile Fiona Yang, Sydney (AU); Alexander Joechner, Sydney (AU)

(21) Appl. No.: 18/281,045

(22) PCT Filed: Mar. 11, 2022
(86) PCT No.: PCT/AU22/50206

§ 371 Date: Sep. 8, 2023

(30) Foreign Application Priority Data
Mar. 11, 2021 (AU) 2021900708
Aug. 17, 2021 (AU) 2021902565
Sep. 1, 2021 (AU) 2021902830

(51) Int. Cl. A61K 40/31; A61K 40/11; A61K 40/42; A61P 35/00; C07K 14/705; C07K 16/28

(52) U.S. Cl. CPC A61K 40/31; A61K 40/11; A61K 40/4202; A61P 35/00; C07K 14/705; C07K 16/28; A61K 2239/13; A61K 2239/22; C07K 2317/55

(57) ABSTRACT

The present invention relates to therapeutics, compositions, kits and methods of treatment comprising:
(a) an immune cell or progenitor thereof, expressing a receptor comprising an antigen-recognition domain and a signalling domain, wherein the antigen-recognition domain binds to a tumour-specific antigen, preferably a dysfunctional P2X₇ receptor, expressed on a cell surface; and
(b) a bridging molecule comprising:
   (i) a targeting moiety that binds to a cell surface molecule on a target cell; and
   (ii) a tumour-specific epitope moiety, preferably a dysfunctional P2X₇ receptor epitope moiety, that is bound by the antigen recognition domain.

### FIELD OF THE INVENTION

[0001] The present invention relates to chimeric antigen receptors, effector cells expressing an antigen receptor and methods of using antigen receptors for the prevention and/or treatment of various conditions, including cancer.

### RELATED APPLICATIONS

[0002] This application is a U.S. national-stage application based on International Application No. PCT/AU2022/050206, filed Mar. 11, 2022, which claims priority from Australian provisional applications AU 2021900708, filed Mar. 11, 2021, AU 2021902565, filed Aug. 17, 2021, and AU 2021902830, filed Sep. 1, 2021, the contents of each of which are hereby incorporated by reference in their entirety.

### SEQUENCE LISTING

[0003] The instant application contains a Sequence Listing which has been submitted electronically in ASCII format and is hereby incorporated by reference in its entirety. Said ASCII copy, created on Feb. 15, 2024, is named FPB-00601_SL.txt and is 657,916 bytes in size.

### BACKGROUND OF THE INVENTION

[0004] Cancer immunotherapy is a rapidly growing field. The development of T cells expressing chimeric antigen receptors (CARs) has revolutionised adoptive cell therapies.

[0005] The potential of this approach has been demonstrated in clinical trials, wherein CAR T cells were infused into adult and paediatric patients with B-cell malignancies, neuroblastoma, and sarcoma. To date, over 500 clinical trials have emerged worldwide, designed at testing the efficacy of CAR T cells targeted to bind 64 different tumour associated antigens. Among these, three CD19-specific CAR T cell products have been approved for the treatment of acute lymphoblastic leukaemia (ALL), large B cell lymphoma and mantle cell lymphoma. To date, most of the success with CAR T therapies has been observed in the context of so-called “liquid” tumours, or where the CARs are directed to CD19, CD22 or the B cell maturation antigen (BCMA).

[0006] Several challenges remain in the clinical application of CAR T cell therapies. These include difficulties with achieving sufficient therapeutic responses in the context of solid tumours, which may be due to insufficient activation, expansion and persistence of CAR T cells and/or the immunosuppressive tumour microenvironment. In addition, the long-term clinical application of CAR T therapies can be negatively impacted by the selective pressure of mono-specific CAR T cells, antigen-negative escape variants, and antigen depletion. Moreover, low levels of target antigen expression in healthy tissues can result in severe “on-target, off-tumour” toxicities. Finally, cytokine release syndrome (CRS) and CAR T cell-related encephalopathy syndrome (CRES) are frequently observed side effects of CAR T cell therapy.

[0007] There is consequently a need for new and improved approaches to CAR, preferably CAR-T, therapies.

[0008] Reference to any prior art in the specification is not an acknowledgment or suggestion that this prior art forms part of the common general knowledge in any jurisdiction or that this prior art could reasonably be expected to be understood, regarded as relevant, and/or combined with other pieces of prior art by a skilled person in the art.

### SUMMARY OF THE INVENTION

[0009] In one aspect, the present invention provides a two component therapeutic comprising:
[0010] (a) an immune cell or progenitor thereof, expressing a receptor comprising an antigen-recognition domain and a signalling domain, wherein the antigen-recognition domain binds to a tumour-specific antigen expressed on a cell surface; and
[0011] (b) a bridging molecule comprising:
   [0012] (i) a targeting moiety that binds to a cell surface molecule on a target cell; and
   [0013] (ii) a tumour-specific antigen epitope moiety that is bound by the antigen recognition domain.

[0014] In any aspect, the tumour-specific antigen is an antigen expressed on a solid tumour or liquid tumour. In one embodiment, the tumour-specific antigen is any one of nfP2X₇, EGFRvIII or CLDN6.

[0015] In one aspect, the present invention provides a two component therapeutic comprising:
[0016] (a) an immune cell or progenitor thereof, expressing a receptor comprising an antigen-recognition domain and a signalling domain, wherein the antigen-recognition domain binds to a dysfunctional P2X₇ receptor expressed on a cell surface; and
[0017] (b) a bridging molecule comprising:
   [0018] (i) a targeting moiety that binds to a cell surface molecule on a target cell; and
   [0019] (ii) a dysfunctional P2X₇ receptor epitope moiety that is bound by the antigen recognition domain.

[0020] In another aspect, the present invention provides a composition comprising:
[0021] (a) an immune cell or progenitor thereof, expressing a receptor comprising an antigen-recognition domain and a signalling domain, wherein the antigen-recognition domain binds to a dysfunctional P2X₇ receptor expressed on a cell surface; and
[0022] (b) a bridging molecule comprising:
   [0023] (i) a targeting moiety that binds to a cell surface molecule on a target cell; and
   [0024] (ii) a dysfunctional P2X₇ receptor epitope moiety that is bound by the antigen recognition domain.

[0025] In another aspect, the present invention provides a kit comprising:
[0026] (a) an immune cell or progenitor thereof, expressing a receptor comprising an antigen-recognition domain and a signalling domain, wherein the antigen-recognition domain binds to a dysfunctional P2X₇ receptor expressed on a cell surface; and
[0027] (b) a bridging molecule comprising:
   [0028] (i) a targeting moiety that binds to a cell surface molecule on a target cell; and
   [0029] (ii) a dysfunctional P2X₇ receptor epitope moiety that is bound by the antigen recognition domain.

[0030] In any embodiment, the bridging molecule may be a polypeptide, or a polypeptide conjugated to a molecule with the function of a bridging molecule, e.g. a DNA aptamer. The polypeptide may be expressed by the immune cell or progenitor thereof. Alternatively, the therapeutic, composition or kit may comprise the polypeptide, or a nucleic acid encoding said polypeptide.

[0031] In a further aspect, the present invention provides an immune cell, or progenitor thereof comprising:
[0032] (i) a receptor comprising an antigen-recognition domain and a signalling domain, wherein the antigen-recognition domain binds a first tumour antigen, wherein the first tumour antigen is a tumour-specific antigen (preferably dysfunctional P2X₇ receptor), and
[0033] (ii) an inducible expression construct encoding a bridging molecule in the form of a fusion protein comprising (a) an antibody, or antigen binding fragment thereof, that binds a second tumour antigen, and (b) a peptide or a fragment of a tumour-specific antigen (preferably a dysfunctional P2X₇ receptor).

[0034] In another aspect, the present invention provides a bridging molecule comprising:
[0035] (i) a targeting moiety that binds to a cell surface molecule on a target cell; and
[0036] (ii) a tumour-specific antigen epitope moiety (preferably a dysfunctional P2X₇ receptor epitope moiety) that is recognised or capable of being bound by an antigen recognition domain of a receptor, optionally wherein the receptor is a chimeric antigen receptor.

[0037] The bridging molecule may be a polypeptide, for example a fusion or chimeric protein. In alternative embodiments, the bridging molecule may comprise polypeptides or peptides that are linked via linking molecules.

[0038] In another aspect, the present invention provides a nucleic acid comprising a nucleotide sequence encoding a bridging molecule as described herein. Preferably, the nucleic acid comprises a first nucleotide sequence encoding a targeting moiety and a second nucleotide sequence encoding a tumour-specific antigen epitope moiety. Preferably, the tumour-specific antigen epitope moiety is a dysfunctional P2X₇ receptor epitope moiety.

[0039] In another aspect, the present invention provides a vector or expression construct comprising a nucleic acid of the invention. In one embodiment, the vector or expression construct further comprises a nucleotide sequence encoding the receptor comprising an antigen-recognition domain and signalling domain, wherein the antigen-recognition domain recognises a dysfunctional P2X₇ receptor expressed on a cell surface, as described herein.

[0040] In another aspect, the present invention provides a method of treating a disorder in a subject, the method comprising administering to the subject:
[0041] (a) a cell expressing a receptor comprising an antigen-recognition domain and a signalling domain, wherein the antigen-recognition domain binds to a tumour-specific antigen (preferably, the tumour specific antigen is a dysfunctional P2X₇ receptor) expressed on a cell surface; and
[0042] (b) a bridging molecule comprising:
   [0043] (i) a targeting moiety that binds to a cell surface molecule on a target cell; and
   [0044] (ii) a tumour-specific antigen epitope moiety, preferably a dysfunctional P2X₇ receptor epitope moiety, that is bound by the antigen recognition domain,
   [0045] thereby treating the disorder in the subject.

[0046] In another aspect, the present invention provides a method of treating cancer in a subject, the method comprising administering:
[0047] (a) an immune cell expressing a receptor comprising an antigen-recognition domain and a signalling domain, wherein the antigen-recognition domain binds to a tumour-specific antigen, preferably a dysfunctional P2X₇ receptor, expressed on a cell surface; and
[0048] (b) a bridging molecule comprising:
   [0049] (i) a targeting moiety that binds to a cell surface molecule on a target cell; and
   [0050] (ii) a tumour-specific epitope moiety, preferably a dysfunctional P2X₇ receptor epitope moiety, that is bound by the antigen recognition domain.

[0051] In another aspect, the present invention provides a method of killing a target cell, the method including exposing the target cell to:
[0052] (a) an immune cell expressing a receptor comprising an antigen-recognition domain and a signalling domain, wherein the antigen-recognition domain binds to a tumour-specific antigen, preferably a dysfunctional P2X₇ receptor, expressed on a cell surface; and
[0053] (b) a bridging molecule comprising:
   [0054] (i) a targeting moiety that binds to a cell surface molecule on the target cell; and
   [0055] (ii) a tumour-specific antigen epitope moiety, preferably a dysfunctional P2X₇ receptor epitope moiety, that is bound by the antigen recognition domain,
   [0056] thereby killing the target cell.

[0057] The target cell may be a cancer cell, or a cell capable of presenting a peptide from an infectious agent on an MHC class receptor. The target cell may or may not express a tumour-specific antigen, for example a dysfunctional P2X₇ receptor.

[0058] In any aspect, the target cell may be any cell expressing a dysfunctional P2X₇ receptor, for example a cancer cell.

[0059] In any embodiment, 2 or more bridging molecules may be administered to a subject, each bridging molecule comprising a targeting moiety that binds to a different cell surface molecule on a target cell. For example, in the context of a method of treating cancer, each bridging molecule administered may comprise different targeting moieties and may therefore bind to a different tumour associated antigen present on the cancer cells. Such embodiments facilitate redirection of a single class of CAR T cell to multiple antigens present on tumour antigens (including at the same time) and therefore provide a multi-pronged approach for killing of cancer cells.

[0060] Accordingly, in any embodiment, the method of treating cancer comprises administering 2 or more bridging molecules, wherein each bridging molecule comprises targeting moieties for binding to different cell surface antigens on a target cell.

[0061] In further embodiments, the bridging molecules may bind to different epitopes on the same cell surface antigen expressed by the cancer cell. Accordingly, in further embodiments, the methods of the invention comprise treating cancer comprises administering 2 or more bridging molecules, wherein each bridging molecule comprises targeting moieties for binding to different epitopes on the same cell surface antigen on a target cell.

[0062] Further still, the invention provides for methods wherein bridging molecules for redirecting a CAR T cell to different cancer antigens, can be administered synchronously to a subject in need thereof. This allows for fine-tuning of the therapeutic approach, such that a CAR T cell may be directed to binding cancer cells via different antigens, at different times during the course of the patient's therapeutic regimen.

[0063] In further embodiments, a single bridging molecule may comprise more than one targeting moiety, such that a single molecule comprises targeting moieties for more than one cell surface molecule on a target cell.

[0064] Further still, a single bridging molecule may comprise more than one targeting moiety, such that a single molecule comprises targeting moieties for the same cell surface molecule on a target cell, but wherein the targeting moieties bind to different epitopes on the cell surface molecule.

[0065] In any embodiment of aspects directed to methods of treatment herein, the bridging molecule may be delivered via infusion to the subject or may be expressed by the immune cell expressing the chimeric antigen receptor. The bridging molecule may be a polypeptide, which is encoded in an inducible or a constitutive expression construct contained in the immune cell.

[0066] In any embodiment, the antigen-recognition domain binds to an epitope associated with an adenosine triphosphate (ATP)-binding site of the dysfunctional P2X₇ receptor. In some embodiments, the dysfunctional P2X₇ receptor has a reduced capacity to bind ATP at the ATP-binding site compared to an ATP-binding capacity of a functional P2X₇ receptor (e.g., a receptor having wild-type sequence and having a conformation or fold of an ATP-binding receptor). In some embodiments the dysfunctional P2X₇ receptor cannot bind ATP at the ATP-binding site.

[0067] In any embodiment, the dysfunctional P2X₇ receptor has a conformational change that renders the receptor dysfunctional. In some embodiments, the conformational change is a change of an amino acid from the trans-conformation to the cis-conformation. In some embodiments, the amino acid that has changed from a trans-conformation to a cis-conformation is proline at amino acid position 210 of the dysfunctional P2X₇ receptor.

[0068] In any embodiment, the antigen-recognition domain binds to an epitope that includes the proline at amino acid position 210 of the dysfunctional P2X₇ receptor. In some embodiments, the antigen-recognition domain binds to an epitope that includes one or more amino acid residues spanning from glycine at amino acid position 200 to cysteine at amino acid position 216, inclusive, of the dysfunctional P2X₇ receptor.

[0069] The antigen-recognition domain of the receptor can be any suitable molecule that can interact with and specifically binds to a dysfunctional P2X₇ receptor. However, in some embodiments, the antigen-recognition domain includes amino acid sequence homology to the amino acid sequence of an antibody, or a fragment thereof, which binds to the dysfunctional P2X₇ receptor. In some embodiments, the antigen-recognition domain includes amino acid sequence homology to the amino acid sequence of a fragment-antigen binding (Fab) portion of an antibody that binds to a dysfunctional P2X₇ receptor. In some embodiments, the antibody is a humanised antibody.

[0070] In any embodiment, the antigen-recognition domain includes amino acid sequence homology to the amino acid sequence of a single-chain variable fragment (scFv) or a multivalent scFv that binds to a dysfunctional P2X₇ receptor. In some embodiments, the multivalent scFv is a divalent or trivalent scFv.

[0071] In any embodiment, the antigen-recognition domain includes amino acid sequence homology to a single-antibody domain (sdAb) that binds to a dysfunctional P2X₇ receptor.

[0072] In any embodiment, the antigen-recognition domain includes a binding polypeptide that includes amino acid sequence homology to one or more complementarity determining regions (CDRs) of an antibody that binds to a dysfunctional P2X₇ receptor. In any embodiment, the binding polypeptide includes amino acid sequence homology to the CDR1, 2 and 3 domains of the V_{H} and/or V_{L} chain of an antibody that binds to a dysfunctional P2X₇ receptor. In preferred embodiments, the binding polypeptide comprises the amino acid sequence of the CDRs of the V_{H} and/or V_{L} chain of an antibody, or the amino acid sequence of the V_{H} and/or V_{L} chains of an antibody, or the amino acid sequence of an antibody or fragment thereof, wherein the antibody or fragment thereof comprises the amino acid sequences of any antibody described in PCT/AU2002/000061 or PCT/AU2002/001204 (or in any one of the corresponding U.S. Pat. No. 7,326,415, 7,888,473, 7,531,171, 8,080,635, 8,399,617, 8,709,425, 9,663,584, or 10,450,380), PCT/AU2007/001540 (or in corresponding U.S. Pat. No. 8,067,550), PCT/AU2007/001541 (or in corresponding US publication US 2010-0036101), PCT/AU2008/001364 (or in any one of the corresponding U.S. Pat. Nos. 8,440,186, 9,181,320, 9,944,701 or U.S. Pat. No. 10,597,451), PCT/AU2008/001365 (or in any one of the corresponding U.S. Pat. No. 8,293,491 or U.S. Pat. No. 8,658,385), PCT/AU2009/000869 (or in any one of the corresponding U.S. Pat. No. 8,597,643, 9,328,155 or 10,238,716), PCT/AU2010/001070 (or in any one of the corresponding publications WO/2011/020155, U.S. Pat. Nos. 9,127,059, 9,688,771, or U.S. Pat. No. 10,053,508), and PCT/AU2010/001741 (or in any one of the corresponding publications WO 2011/075789 or U.S. Pat. No. 8,835,609) the entire contents of which are hereby incorporated by reference. Preferably the antibody comprises the CDR amino acid sequences of 2-2-1 described in PCT/AU2010/001070 (or in any one of the corresponding U.S. Pat. Nos. 9,127,059, 9,688,771, or U.S. Pat. No. 10,053,508) or BPM09 described in PCT/AU2007/001541 (or in corresponding US publication US 2010-0036101) and produced by the hybridoma AB253 deposited with the European Collection of Cultures (ECACC) under Accession no. 06080101.

[0073] In some embodiments, the signalling domain includes a portion derived from an activation receptor. In some embodiments, the activation receptor is a member of the CD3 co-receptor complex or is an Fc receptor. In some embodiments, the portion derived from the CD3 co-receptor complex is CD3-ζ. In some embodiments, the portion derived from the Fc receptor is FcεRI or FcγRI.

[0074] In some embodiments, the signalling domain includes a portion derived from a co-stimulatory receptor. In some embodiments, the signalling domain includes a portion derived from an activation receptor and a portion derived from a co-stimulatory receptor.

[0075] In some embodiments, the co-stimulatory receptor is selected from the group consisting of CD27, CD28, CD30, CD40, DAP10, OX40, 4-1BB (CD137) and ICOS.

[0076] In any aspect, the cell expressing an antigen receptor may be an immune cell, for example an immune cell as described herein, or a cell that is capable of differentiating into an immune cell (e.g., a progenitor of an immune cell). A cell that is capable of differentiating into an immune cell (e.g. T cell that will express the dysfunctional P2X₇ CAR) may be a stem cell, multi-lineage progenitor cell or induced pluripotent stem cell.

[0077] In any embodiment of the aforementioned aspects, the receptor comprising an antigen-recognition domain and a signalling domain is a chimeric receptor antigen (CAR).

[0078] In any aspect, the targeting moiety that binds to a cell surface molecule on a target cell comprises or consists of a peptide or antibody or antibody fragment. Alternatively, the targeting moiety may comprise a ligand or binding partner for a protein or receptor present on the target cell surface.

[0079] The targeting moiety may further comprise a soluble T cell receptor (TcR) or a single chain T cell receptor binding motif or a T cell receptor-like mAb. In such embodiments, the targeting moiety is particularly suitable for the binding of peptides derived from intracellularly processed proteins from infectious agents that are presented on a cell surface via MHC (HLA) I and II molecules. The targeting moiety may also be suitable for binding of peptides presented by MHC molecules, wherein the peptides comprise mutations associated with cancers, such as the cancer testis antigens (WT1, NY-ESO-1, PRAME family (e.g. PRA100, PRA142, PRA300, PRA425 and others), MAGE family (e.g., MAGE-A1, MAGE-A3, MAGE-A4, MAGE-A12 and others), CT83, SSX2, GAGE, BAGE, PAGE) or other cancer specific mutations.

[0080] In any embodiment, the cell surface molecule may comprise an antigen, preferably an antigen as described herein.

[0081] The cell surface molecule may be selected from a protein, a lipid moiety, a glycoprotein, a glycolipid, a carbohydrate, a polysaccharide, a nucleic acid, an MHC-bound peptide, or a combination thereof.

[0082] The cell surface molecule may comprise parts (e.g., coats, capsules, cell walls, flagella, fimbrae, and toxins) of bacteria, viruses, and other microorganisms. The cell surface molecule may be expressed by the target cell.

[0083] The cell surface molecule may not be expressed by the target cell. By way of non-limiting example, the cell surface molecule may be a ligand expressed by a cell that is not the target cell and that is bound to the target cell or a cell surface molecule of the target cell. Also, by non-limiting example, the cell surface molecule may be a toxin, exogenous molecule or viral protein that is bound to a cell surface or cell surface receptor of the target cell.

[0084] In any aspect or embodiment, the targeting moiety of the bridging molecule does not bind to the same antigen or epitope as the antigen-recognition of the receptor.

[0085] For example, the targeting moiety of the bridging molecule does not bind to a dysfunctional P2X₇ receptor, the E200, E300, or E200/E300 composite epitope, or any other epitope present on a dysfunctional P2X₇ receptor as described herein.

[0086] The targeting moiety may be a targeting antibody or antibody fragment. The targeting antibody or antibody fragment may be an immunoglobulin (Ig). The immunoglobulin may be selected from an IgG, an IgA, an IgD, an IgE, an IgM, a fragment thereof or a modification thereof. The immunoglobulin may be IgG. The IgG may be IgG1. The IgG may be any IgG subclass.

[0087] In any embodiment, a bridging molecule of the invention may comprise more than one targeting moiety. For example, in certain non-limiting embodiments, the bridging molecule may comprise two different antibodies, or fragment thereof. The antibodies may bind different epitopes of the same cell surface molecule on the target cell. Alternatively, the antibodies may bind epitopes of different cell surface molecules on the target cell.

[0088] The dysfunctional P2X₇ receptor epitope moiety may be provided in the form of a P2X₇ receptor, or a fragment of a P2X₇ receptor that has at least one of the three ATP binding sites that are formed at the interface between adjacent correctly packed monomers that are unable to bind ATP. Such receptors are unable to extend the opening of the non-selective calcium channels to apoptotic pores.

[0089] In any aspect, the dysfunctional P2X₇ receptor epitope moiety comprises or consists of a fragment of a dysfunctional P2X₇ receptor. Exemplary fragments include GHNYTTRNILPGLNITC (SEQ ID NO: 2; also referred to herein as the “E200 epitope”) and variants thereof (exemplary variants are provided in SEQ ID NOs: 3 to 10 and 15 to 30 and 168); KYYKENNVEKRTLIKVF (SEQ ID NO: 12 and 13; also referred to herein as the “E300” epitope); or GHNYTTRNILPGAGAKYYKENNVEK (SEQ ID NO: 14; also referred to herein as the “E200/E300” or “composite” epitope). Further examples are provided in Table 1 herein.

[0090] In any aspect, the dysfunctional P2X₇ receptor epitope moiety is bound by an antibody that binds to dysfunctional P2X₇ receptors, but is not bound by antibodies that bind to functional P2X₇ receptors.

[0091] In any aspect, a bridging molecule may comprise 2 or more dysfunctional P2X₇ receptor epitope moieties. The 2 or more dysfunctional P2X₇ receptor epitope moieties may comprise or consist of the same sequence, or of different sequences. For example, in any aspect, a bridging molecule may comprise a dysfunctional P2X₇ receptor epitope moiety in the form of the E200 epitope and a further dysfunctional P2X₇ receptor epitope moiety in the form of the E300 epitope. Alternatively, in any aspect, a bridging molecule may comprise a dysfunctional P2X₇ receptor epitope moiety in the form of the E200 epitope and a further dysfunctional P2X₇ receptor epitope moiety in the form of the composite epitope. Still further, in any aspect, a bridging molecule may comprise a first dysfunctional P2X₇ receptor epitope moiety in the form of the E200 epitope and a further dysfunctional P2X₇ receptor epitope moiety in the form of the E200 epitope.

[0092] As used herein, except where the context requires otherwise, the term “comprise” and variations of the term, such as “comprising”, “comprises” and “comprised”, are not intended to exclude further additives, components, integers or steps.

[0093] Further aspects of the present invention and further embodiments of the aspects described in the preceding paragraphs will become apparent from the following description, given by way of example and with reference to the accompanying drawings.

### BRIEF DESCRIPTION OF THE DRAWINGS

[0094] FIG. 1: Diagrammatic representation of exemplary bridging molecules.

[0095] FIG. 2: Diagrammatic representation of exemplary embodiments of the present invention utilising nfP2X₇-CAR and Fab-based E200 bridging molecules targeting cancer, infection and immunomodulatory-related target antigens.

[0096] FIG. 3: Diagrammatic representation of exemplary embodiments of the present invention utilising nfP2X₇-CAR and single chain TCR-based E200 bridging molecules targeting cancer and infection-related peptides.

[0097] FIG. 4: Bridging molecules in Fab format with a single E200 epitope either directly linked to the V_{H} ((a) and (b)) or via a linker ((c) and (d)) binds to CD19 on JeKo-1 (mantle cell lymphoma) cell line and the E200 epitope is available for binding to an antibody (BIL03_2-2-1-AF647). HIS tag is detected by FITC antibody. (a) and (c) show anti-HIS antibody binding, (b) and (d) show binding of antibody to dysfunctional P2X₇ receptor epitope.

[0098] FIG. 5: Bridging molecules in scFv format with a single E200 epitope either directly linked to the V_{H} ((a) and (b)) or via a linker ((c) and (d)) binds to CD19 on JeKo-1 (mantle cell lymphoma) cell line and the E200 epitope is available for binding to an antibody. (a) and (c) show anti-HIS antibody binding, (b) and (d) show binding of antibody to dysfunctional P2X₇ receptor epitope.

[0099] FIG. 6: Bridging molecules in Fab format with a single E200 epitope either directly linked to the V_{L} ((a) and (b)) or via a linker ((c) and (d)) binds to CD19 on JeKo-1 (mantle cell lymphoma) cell line and the E200 epitope is available for binding to an antibody. (a) and (c) show anti-HIS antibody binding, (b) and (d) show binding of antibody to dysfunctional P2X₇ receptor epitope.

[0100] FIG. 7: Bridging molecules in scFv format with a single E200 epitope either directly linked to the V_{L} ((a) and (b)) or via a linker ((c) and (d)) binds to CD19 on JeKo-1 (mantle cell lymphoma) cell line and the E200 epitope is available for binding to an antibody. (a) and (c) show anti-HIS antibody binding, (b) and (d) show binding of antibody to dysfunctional P2X₇ receptor epitope.

[0101] FIG. 8: Binding of bridging molecules to various antigens CD37, CD79B, ROR1, CD33, CD38, CD123, CD135, BCMA, EGFR, PDL1, CD22, CD70 and CD20. (a), (c), (e), (g), (i), (k), (m), (o), (q), (s), (u), (w) and (y) show anti-HIS antibody binding, (b), (d), (f), (h), (j), (l), (n), (p), (r), (t), (v), (x) and (z) show binding of antibody to dysfunctional P2X₇ receptor epitope.

[0102] FIG. 9: “painting” of JeKo-1 cells with CD19 targeted Fab bridging molecules in the illustrated format as detected by flow cytometry. Cells were incubated at indicated concentrations with Fab bridging molecules. CD33 targeted Fab bridging molecules served as negative control in JeKo-1 at 10 ng/mL and 1000 ng/mL. CD19 targeted Fab bridging molecules were used at 1 ng/mL, 10 ng/mL, 100 ng/mL and 1000 ng/mL.

[0103] FIG. 10: “painting” of MOLM-13 cells with CD33 targeted Fab bridging molecules in the illustrated format as detected by flow cytometry. Cells were incubated at indicated concentrations with Fab bridging molecules. CD19 targeted Fab bridging molecules served as negative control in JeKo-1 at 10 ng/mL and 1000 ng/mL. CD33 targeted Fab bridging molecules were used at 1 ng/mL, 10 ng/mL, 100 ng/mL and 1000 ng/mL.

[0104] FIG. 11: Illustrates the “painting” of MOLM-13 (AML) cells via CD33 targeted Fab bridging molecules. The flow data shows in black the isotype control, in blue the staining with BILO3 2-2-1 sd-mAb only at 1 ug/mL and in green the increase of staining via the combination of CD33 targeted Fab bridging molecules and BILO3 2-2-1 sd-mAb. The increase of target molecules that can be recognised by the nfP2X₇ BRIDGE CAR expressing effector cells translate into CAR-mediated effector function. The use of the bridging molecules enhances the CAR function by increasing the targeting epitopes on the cancer cells.

[0105] FIG. 12: A representative flow cytometric plot with direct comparison of untransduced T cells (left panel), CAR0007_hPGK (middle panel) and CAR0007_EF1a (right panel) expressing T cells. Both CAR T cells containing conditions showed significantly increased expression of the activation markers CD25 and CD69 in incubation with MOLM-13 at 20:1 ET ratio and CD33 targeted Fab bridging molecules at 1000 ng/mL after 48 hours.

[0106] FIG. 13: The flow cytometric plots of T cells and MOLM-13 at 20:1 ET ratio and CD33 targeted Fab bridging molecules at 1000 ng/mL after 48 hours corresponding to FIG. 12 showed a complete clearance of leukaemic cells in the conditions containing CAR0007_hPGK and CAR0007_EF1a whereas there was no relevant impact on leukaemic cell number in the untransduced T cell condition.

[0107] FIG. 14: Flow cytometric plots that illustrate the dose dependent clearance of leukaemic cells at indicated CD33 targeted Fab bridging molecule concentrations of CAR0007_EF1a containing T cells and MOLM-13 at 20:1 ET ratio after 48 hours. As low as 40 ng/mL showed almost complete elimination of leukaemic cells and complete elimination of leukaemic cells at 200 and 1000 ng/mL.

[0108] FIG. 15: (a) Specific lysis of MOLM-13 leukaemic cells by CAR0007_hPGK T cells at an ET ratio of 20:1 after 48 hour incubation with and without EGFR and CD33 targeted bridging molecules at indicated concentrations is illustrated. Significant lysis in a dose dependent manner was found for increasing concentrations (40, 200 and 1000 ng/mL) of CD33 targeted Fab bridging molecules. (b) Specific lysis of MOLM-13 leukaemic cells by CAR0007_hEF1a T cells at an ET ratio of 20:1 after 48 hour incubation with and without EGFR and CD33 targeted bridging molecules at indicated concentrations is illustrated. Significant lysis in a dose dependent manner was found for increasing concentrations (40, 200 and 1000 ng/mL) of CD33 targeted Fab bridging molecules.

[0109] FIG. 16: A titration experiment of EGFR and CD33 targeted Fab-bridging molecules was used to test the impact on killing of MOLM-13 by CAR0007_hPGK.

[0110] There was a significant impact on the viability of MOLM-13 after 24 hour incubation at 10:1 ET ratio between the condition with EGFR targeted bridging molecules and CD33 targeted bridging molecules at 1000 ng/mL. Statistical analysis was performed by t-test.

[0111] FIG. 17: Alternative representation of the data from FIG. 16. There was no significant difference in the titration of the EGFR bridging molecules (data not shown). There were significant differences in the titration of the CD33 bridging molecules. Statistical analyses were performed by One-Way ANOVA and post-hoc test Tukey.

[0112] FIG. 18: A titration experiment of EGFR and CD33 targeted Fab-bridging molecules was used to test the impact on killing of MOLM-13 by CAR0007_hPGK. There was a significant impact on the viability of MOLM-13 after 24 hour incubation at 20:1 ET ratio between the condition with EGFR targeted bridging molecules and CD33 targeted bridging molecules at 200 ng/mL and 1000 ng/mL. Statistical analysis was performed by t-test.

[0113] FIG. 19: Alternative representation of the data from FIG. 18. There was no significant difference in the titration of the EGFR bridging molecules (data not shown). There were significant differences in the titration of the CD33 bridging molecules. Statistical analyses were performed by One-Way ANOVA and post-hoc test Tukey.

[0114] FIG. 20: A titration experiment of EGFR and CD33 targeted Fab-bridging molecules was used to test the impact on killing of MOLM-13 by CAR0007_hPGK. There was a significant impact on the viability of MOLM-13 after 48 hour incubation at 10:1 ET ratio between the condition with EGFR targeted bridging molecules and CD33 targeted bridging molecules at 200 ng/mL and 1000 ng/mL. Statistical analysis was performed by t-test.

[0115] FIG. 21: A titration experiment of EGFR and CD33 targeted Fab-bridging molecules was used to test the impact on killing of MOLM-13 by CAR0007_hPGK. There was a significant impact on the viability of MOLM-13 after 48 hour incubation at 20:1 ET ratio between the condition with EGFR targeted bridging molecules and CD33 targeted bridging molecules at 200 ng/mL and 1000 ng/mL. Statistical analysis was performed by t-test.

[0116] FIG. 22: A titration experiment of EGFR and CD33 targeted Fab-bridging molecules was used to test the impact on killing of MOLM-13 by CAR0007_EF1a. There was a significant impact on the viability of MOLM-13 after 24 hour incubation at 10:1 ET ratio between the condition with EGFR targeted bridging molecules and CD33 targeted bridging molecules at 200 ng/mL and 1000 ng/mL. Statistical analysis was performed by t-test.

[0117] FIG. 23: Alternative representation of the data from FIG. 22. There was no significant difference in the titration of the EGFR bridging molecules (data not shown). There were significant differences in the titration of the CD33 bridging molecules. Statistical analyses were performed by One-Way ANOVA and post-hoc test Tukey.

[0118] FIG. 24: A titration experiment of EGFR and CD33 targeted Fab-bridging molecules was used to test the impact on killing of MOLM-13 by CAR0007_EF1a. There was a significant impact on the viability of MOLM-13 after 24 hour incubation at 20:1 ET ratio between the condition with EGFR targeted bridging molecules and CD33 targeted bridging molecules at 40 ng/mL, 200 ng/mL and 1000 ng/mL. Statistical analysis was performed by t-test.

[0119] FIG. 25: Alternative representation of the data from FIG. 24. There was no significant difference in the titration of the EGFR bridging molecules (data not shown). There were significant differences in the titration of the CD33 bridging molecules. Statistical analyses were performed by One-Way ANOVA and post-hoc test Tukey.

[0120] FIG. 26: A titration experiment of EGFR and CD33 targeted Fab-bridging molecules was used to test the impact on killing of MOLM-13 by CAR0007_EF1a. There was a significant impact on the viability of MOLM-13 after 48 hour incubation at 10:1 ET ratio between the condition with EGFR targeted bridging molecules and CD33 targeted bridging molecules at 40 ng/mL, 200 ng/mL and 1000 ng/mL. Statistical analysis was performed by t-test.

[0121] FIG. 27: A titration experiment of EGFR and CD33 targeted Fab-bridging molecules was used to test the impact on killing of MOLM-13 by CAR0007_EF1a. There was a significant impact on the viability of MOLM-13 after 48 hour incubation at 20:1 ET ratio between the condition with EGFR targeted bridging molecules and CD33 targeted bridging molecules at 40 ng/mL, 200 ng/mL and 1000 ng/mL. Statistical analysis was performed by t-test.

[0122] FIG. 28: (a) A kill assay (cytotoxicity was measure by quantification of residual leukaemic cells compared with a control) the elimination of leukaemic cells at the EGFR bridging molecule concentrations 40, 200 and 1000 ng/mL showed no significant difference between untransduced T cells compared with CAR T cells. (b) The elimination of leukaemic cells at the CD33 bridging molecule concentrations 40, 200 and 1000 ng/mL showed a significant difference between untransduced T cells compared with both CAR0007 transduced T cells (hPGK and EF1a).

[0123] FIG. 29: A titration experiment of CD33 targeted Fab-bridging molecules was used to test the impact on killing of MOLM-13 by untransduced T cells, CAR0007_hPGK and CAR0007_EF1a effector cells at an ET ratio 10:1 after 48 hour incubation.

[0124] FIG. 30: Analysis of the results in FIG. 29. There was a consistent significant difference in the titration of the CD33 bridging molecules between the three effector cell populations at 40 ng/mL, 200 ng/mL and 1000 ng/mL. Statistical analyses were performed by One-Way ANOVA and post-hoc test Tukey to compare the named three conditions per concentration of EGFR bridging molecules.

[0125] FIG. 31: A titration experiment of CD33 targeted Fab-bridging molecules was used to test the impact on killing of MOLM-13 by untransduced T cells, CAR0007_hPGK and CAR0007_EF1a effector cells at an ET ratio 20:1 after 48 hour incubation

[0126] FIG. 32: Analysis of the results in FIG. 31. There was a consistent significant difference in the titration of the CD33 bridging molecules between the three effector cell populations at 8 ng/mL, 40 ng/mL, 200 ng/mL and 1000 ng/mL. Statistical analyses were performed by One-Way ANOVA and post-hoc test Tukey to compare the named three conditions per concentration of EGFR bridging molecules.

[0127] FIG. 33: Cell killing by nfP2X₇ CAR-T cells in the presence of CD19-targeting bridging molecules in Fab and IgG1 format and with different dysfunctional P2X₇ receptor epitope moieties. CAR10 versus JeKo-1 Effector cell/Target cell (ET) ratio 10:1. CAR10 to target 2.9:1. N=1 healthy donor. 6 replicates. CAR10 expression (d12)=28.6%. Indicated significance is the group versus the control (****) are all significantly different from the control.

[0128] FIG. 34: Cell killing by nfP2X₇ CAR-T cells in the presence of CD19-targeting bridging molecules with different dysfunctional P2X₇ receptor epitope moieties. CAR10 versus JeKo-1 Effector cell/Target cell (ET) ratio 20:1. N=1 healthy donor. 100 ng/mL Fab CD19 bridging molecules. 6 replicates. In all CAR conditions, CAR expressing cells were normalised to ET ratio 1.48:1. Indicated significance is the group versus the control (****) are all significantly different from the control.

[0129] FIG. 35: Cell killing by three different classes of nfP2X₇ CAR-T cells (i.e. having different CAR architectures), in the presence of CD19-targeting bridging molecules in Fab and IgG1 format. CAR7, CAR10 and CAR16 versus JeKo-1 Effector cell/Target cell (ET) ratio 10:1. CAR7 to target 3.3:1; CAR10 to target 2.8:1. CAR16 to target 2.2:1. N=1 healthy donor. 6 replicates. CAR7 expression (d12) 33.3%; CAR10 expression (d12)=28.6%; CAR16 expression (d12)=22.6%. Indicated significance is the group versus the control (****) are all significantly different from the control.

[0130] FIG. 36: Cell killing by nfP2X₇ CAR-T cells in the presence of A) CD19-targeting bridging molecules in Fab format. (killing of JeKo-1 cells) or b) CD33-targeting bridging molecule in Fab format (killing of MOLM-13 cells).

[0131] FIG. 37: Schematic of in vivo evaluation of bridging molecules.

[0132] FIG. 38: bioluminescence (total Flux, p/s) as an indicator of tumour burden in mice following inoculation of Jeko-1_LUC_eGFP cells. Mice received treatment with: Group 1=no treatment; Group 2=activated untransduced T cells; Group 3=bridging molecule (E200 epitope+anti-CD19 Fab); Group 4=activated untransduced T cells+bridging molecule; Group 5=3^{rd} generation anti-CD19 CAR T cells; Group 6=T cells expressing anti-nfP2X₇ receptor CAR 1; Group 7=CAR 1-T cells+bridging molecule; Group 8=T cells expressing nfP2X₇ receptor CAR 2; Group 9=CAR 2-T cells+bridging molecule.

TABLE 1
Sequence Information

| | | |
|---|---|---|
| | | SEQ |
| Description | Sequence | ID NO: |

Exemplary dysfunctional P2X₇ receptor epitope moiety sequences

| | | |
|---|---|---|
| Human P2X₇ | MPACCSCSDVFQYETNKVTRIQSMNYGTIKWFFHVIIFSYV | 1 |
| receptor | CFALVSDKLYQRKEPVISSVHTKVKGIAEVKEEIVENGVK | |
| | KLVHSVFDTADYTFPLQGNSFFVMTNFLKTEGQEQRLCPE | |
| | YPTRRTLCSSDRGCKKGWMDPQSKGIQTGRCVVYEGNQKT | |
| | CEVSAWCPIEAVEEAPRPALLNSAENFTVLIKNNIDFPGH | |
| | NYTTRNILPGLNITCTFHKTQNPQCPIFRLGDIFRETGDN | |
| | FSDVAIQGGIMGIEIYWDCNLDRWFHHCRPKYSFRRLDDK | |
| | TTNVSLYPGYNFRYAKYYKENNVEKRTLIKVFGIRFDILV | |
| | FGTGGKFDIIQLVVYIGSTLSYFGLAAVFIDFLIDTYSSN | |
| | CCRSHIYPWCKCCQPCVVNEYYYRKKCESIVEPKPTLKYV | |
| | SFVDESHIRMVNQQLLGRSLQDVKGQEVPRPAMDFTDLSR | |
| | LPLALHDTPPIPGQPEEIQLLRKEATPRSRDSPVWCQCGS | |
| | CLPSQLPESHRCLEELCCRKKPGACITTSELFRKLVLSRH | |
| | VLQFLLLYQEPLLALDVDSTNSRLRHCAYRCYATWRFGSQ | |
| | DMADFAILPSCCRWRIRKEFPKSEGQYSGFKSPY | |
| Exemplary E200 | GHNYTTRNILPGLNITC | 2 |
| epitope | | |
| Variant E200 | GHNYTTRNILPGLNIT | 3 |
| epitope peptide | | |
| (E200′) | | |
| E200 epitope Cys | GHNYTTRNILPGLNITS | 4 |
| to Ser | | |
| modification | | |
| Extended E200 | GHNYTTRNILPGLNITSTFHK | 5 |
| Cys to Ser | | |
| modification | | |
| Extended E200′ | GHNYTTRNILPGLNITSTFHKT | 6 |
| Cys to Ser | | |
| modification | | |
| (22 aa) | | |
| Extended E200″ | GHNYTTRNILPGLNITSTFHKTC | 7 |
| Cys to Ser | | |
| modification | | |
| Pep16 | DFPGHNYTTRNILPGC | 8 |
| Pep17 | GHNYTTRNILPGLNITSTFHKTS | 9 |
| Extended Pep17 | GHNYTTRNILPGLNITSTFHKTSGSGK | 10 |
| (27 aa) | | |
| Minimum | NYTTRNILPGL | 11 |
| sequence E200 | | |
| peptide (target | | |
| epitope) | | |
| Exemplary E300 | KYYKENNVEKRTLIK | 12 |
| epitope | | |
| Variant E300 | KYYKENNVEKRTLIKVF | 13 |
| epitope peptide | | |
| (E30′) | | |
| Exemplary | GHNYTTRNILPGAGAKYYKENNVEK | 14 |
| E200/E300 or | | |
| composite epitope | | |
| E200 + G4S | GHNYTTRNILPGLNITSGGGGS | 15 |
| linker | | |
| E200 + 2xG4S | GHNYTTRNILPGLNITSGGGGGGGGS | 16 |
| linker | | |
| E200 + 3xG4S | GHNYTTRNILPGLNITSGGGGSGGGGSGGGGS | 168 |
| linker | | |
| E200_extended | GHNYTTRNILPGLNITSTFHKTGS | 17 |
| peptide 17v3 (24 | | |
| aa) | | |
| E200_extended | GHNYTTRNILPGLNITSTFHGS | 18 |
| peptide 17v4 (22 | | |
| aa) | | |
| E200_extended | GHNYTTRNILPGLNITSGS | 19 |
| peptide 17v5 (19 | | |
| aa) | | |
| E200_extended | DFPGHNYTTRNILPGLNITSGS | 20 |
| peptide 17v6 (22 | | |
| aa) | | |
| (E200 epitope | | |
| extended into N | | |
| terminal region) | | |
| E200_extended | DFPGHNYTTRNILPGLNITSGGGGS | 21 |
| peptide 17v7 (25 | | |
| aa) + linker | | |
| E200_extended | DFPGHNYTTRNILPGLNITSGGGGSGGGGS | 22 |
| peptide 17v8 (30 | | |
| aa) + linker | | |
| E200_extended | DFPGHNYTTRNILPGLNITSGGGGSGGGGSGGGGS | 23 |
| peptide 17v9 (35 | | |
| aa) + linker | | |
| E200_extended | DFPGHNYTTRNILPGLNITSTFHKTSGSGK | 24 |
| peptide 17v10 (30 | | |
| aa) | | |
| E200_extended | DFPGHNYTTRNILPGLNITSTFHKTSGSGKGS | 25 |
| peptide 17v11 (32 | | |
| aa) + linker | | |
| E200_extended | DFPGHNYTTRNILPGLNITSTFHKTSGSGKGGGGS | 26 |
| peptide 17v12 (35 | | |
| aa) + linker | | |
| E200_extended | DFPGHNYTTRNILPGLNITSTFHGGGGS | 27 |
| peptide 17v13 (25 | | |
| aa) + linker | | |
| E200_extended | GHNYTTRNILPGLNITSTFHGGGGS | 28 |
| peptide 17v14 (22 | | |
| aa) + linker | | |
| E200_extended | DFPGHNYTTRNILPGLNITSTFHKTGGGGS | 29 |
| peptide 17v15 (30 | | |
| aa) + linker | | |
| E200_extended | GHNYTTRNILPGLNITSTFHKTGGGGS | 30 |
| peptide 17v16 (27 | | |
| aa) + linker | | |

Exemplary targeting moiety sequences and exemplary bridging
molecules Constructs based on FMC63 (for binding CD19)

| | | |
|---|---|---|
| CD19 binder | EVKLQESGPGLVAPSQSLSVTCTVSGVSLPDYGVSWIRQPPRKG | 31 |
| heavy chain | LEWLGVIWGSETTYYNSALKSRLTIIKDNSKSQVFLKMNSLQTDDT | |
| CD19, FMC63, | AIYYCAKHYYYGGSYAMDYWGQGTSVTVSSASTKGPSVFPLAPS | |
| B001_Heavy | SKSTSGGTAALGCLVKDYFPEPVTVSWNSGALTSGVHTFPAVLQ | |
| Chain | SSGLYSLSSVVTVPSSSLGTQTYICNVNHKPSNTKVDKKVEPKSC | |
| | HHHHHH | |
| CD19 binder light | DIQMTQTTSSLSASLGDRVTISCRASQDISKYLNWYQQKPDGTVK | 32 |
| chain | LLIYHTSRLHSGVPSRFSGSGSGTDYSLTISNLEQEDIATYFCQQG | |
| CD19, FMC63, | NTLPYTFGGGTKLEITKARTVAAPSVFIFPPSDEQLKSGTASVVCL | |
| B001_Light Chain | LNNFYPREAKVQWKVDNALQSGNSQESVTEQDSKDSTYSLSSTL | |
| | TLSKADYEKHKVYACEVTHQGLSSPVTKSFNRGEC | |
| E200 + CD19 | GHNYTTRNILPGLNITSEVKLQESGPGLVAPSQSLSVTCTVSGVSL | 33 |
| binder (nfP2X₇ | PDYGVSWIRQPPRKGLEWLGVIWGSETTYYNSALKSRLTIIKDNS | |
| epitope | KSQVFLKMNSLQTDDTAIYYCAKHYYYGGSYAMDYWGQGTSVT | |
| underlined) | VSSASTKGPSVFPLAPSSKSTSGGTAALGCLVKDYFPEPVTVSW | |
| CD19, FMC63, | NSGALTSGVHTFPAVLQSSGLYSLSSVVTVPSSSLGTQTYICNVN | |
| B002-1_Heavy | HKPSNTKVDKKVEPKSCHHHHHH | |
| Chain | | |
| E200 + CD19 | GHNYTTRNILPGLNITSGGGGSEVKLQESGPGLVAPSQSLSVTCT | 34 |
| binder (nfP2X₇ | VSGVSLPDYGVSWIRQPPRKGLEWLGVIWGSETTYYNSALKSRL | |
| epitope | TIIKDNSKSQVFLKMNSLQTDDTAIYYCAKHYYYGGSYAMDYWG | |
| underlined) | QGTSVTVSSASTKGPSVFPLAPSSKSTSGGTAALGCLVKDYFPEP | |
| CD19, FMC63, | VTVSWNSGALTSGVHTFPAVLQSSGLYSLSSVVTVPSSSLGTQT | |
| B002-2_Heavy | YICNVNHKPSNTKVDKKVEPKSCHHHHHH | |
| Chain | | |
| E200 + CD19 | GHNYTTRNILPGLNITSDIQMTQTTSSLSASLGDRVTISCRASQDIS | 35 |
| binder (nfP2X₇ | KYLNWYQQKPDGTVKLLIYHTSRLHSGVPSRFSGSGSGTDYSLTI | |
| epitope | SNLEQEDIATYFCQQGNTLPYTFGGGTKLEITKARTVAAPSVFIFP | |
| underlined) | PSDEQLKSGTASVVCLLNNFYPREAKVQWKVDNALQSGNSQES | |
| CD19, FMC63, | VTEQDSKDSTYSLSSTLTLSKADYEKHKVYACEVTHQGLSSPVTK | |
| Light chain B003- | SFNRGEC | |
| 1 | | |
| E200 + CD19 | GHNYTTRNILPGLNITSGGGGSDIQMTQTTSSLSASLGDRVTISCR | 36 |
| binder (nfP2X₇ | ASQDISKYLNWYQQKPDGTVKLLIYHTSRLHSGVPSRFSGSGSG | |
| epitope | TDYSLTISNLEQEDIATYFCQQGNTLPYTFGGGTKLEITKARTVAA | |
| underlined) | PSVFIFPPSDEQLKSGTASVVCLLNNFYPREAKVQWKVDNALQS | |
| CD19, FMC63, | GNSQESVTEQDSKDSTYSLSSTLTLSKADYEKHKVYACEVTHQG | |
| Light chain B003- | LSSPVTKSFNRGEC | |
| 2 | | |
| E200 + CD19 | EVKLQESGPGLVAPSQSLSVTCTVSGVSLPDYGVSWIRQPPRKG | 37 |
| binder (nfP2X₇ | LEWLGVIWGSETTYYNSALKSRLTIIKDNSKSQVFLKMNSLQTDDT | |
| epitope | AIYYCAKHYYYGGSYAMDYWGQGTSVTVSSASTKGPSVFPLAPS | |
| underlined) | | |
| CD19, FMC63, | SKSTSGGTAALGCLVKDYFPEPVTVSWNSGALTSGVHTFPAVLQ | |
| B005_Heavy | SSGLYSLSSVVTVPSSSLGTQTYICNVNHKPSNTKVDKKVEPKSC | |
| Chain | GHNYTTRNILPGLNITSHHHHHH | |
| CD19, FMC63, | DIQMTQTTSSLSASLGDRVTISCRASQDISKYLNWYQQKPDGTVK | 38 |
| B005_Light Chain | LLIYHTSRLHSGVPSRFSGSGSGTDYSLTISNLEQEDIATYFCQQG | |
| (His tagged | NTLPYTFGGGTKLEITKARTVAAPSVFIFPPSDEQLKSGTASVVCL | |
| version of SEQ ID | LNNFYPREAKVQWKVDNALQSGNSQESVTEQDSKDSTYSLSSTL | |
| NO: 32) | TLSKADYEKHKVYACEVTHQGLSSPVTKSFNRGECHHHHHH | |
| E200 + CD19 | DIQMTQTTSSLSASLGDRVTISCRASQDISKYLNWYQQKPDGTVK | 39 |
| binder (nfP2X₇ | LLIYHTSRLHSGVPSRFSGSGSGTDYSLTISNLEQEDIATYFCQQG | |
| epitope | NTLPYTFGGGTKLEITKARTVAAPSVFIFPPSDEQLKSGTASVVCL | |
| underlined) | LNNFYPREAKVQWKVDNALQSGNSQESVTEQDSKDSTYSLSSTL | |
| CD19, FMC63, | TLSKADYEKHKVYACEVTHQGLSSPVTKSFNRGECGHNYTTRNIL | |
| B006_Light Chain | PGLNITS | |
| CD19 binder scFv | DIQMTQTTSSLSASLGDRVTISCRASQDISKYLNWYQQKPDGTVK | 40 |
| format | LLIYHTSRLHSGVPSRFSGSGSGTDYSLTISNLEQEDIATYFCQQG | |
| CD19, FMC63, | NTLPYTFGGGTKLEITGGGGSGGGGSGGGGSEVKLQESGPGLV | |
| B011_scFv_Light/ | APSQSLSVTCTVSGVSLPDYGVSWIRQPPRKGLEWLGVIWGSET | |
| Heavy | TYYNSALKSRLTIIKDNSKSQVFLKMNSLQTDDTAIYYCAKHYYYG | |
| | GSYAMDYWGQGTSVTVSSHHHHHH | |
| CD19 binder scFv | EVKLQESGPGLVAPSQSLSVTCTVSGVSLPDYGVSWIRQPPRKG | 41 |
| format | LEWLGVIWGSETTYYNSALKSRLTIIKDNSKSQVFLKMNSLQTDDT | |
| CD19, FMC63, | AIYYCAKHYYYGGSYAMDYWGQGTSVTVSSGGGGSGGGGSGG | |
| B012_scFv_Heavy/ | GGSDIQMTQTTSSLSASLGDRVTISCRASQDISKYLNWYQQKPD | |
| Light | GTVKLLIYHTSRLHSGVPSRFSGSGSGTDYSLTISNLEQEDIATYF | |
| | CQQGNTLPYTFGGGTKLEITHHHHHH | |
| E200 + CD19 | GHNYTTRNILPGLNITSDIQMTQTTSSLSASLGDRVTISCRASQDI | 42 |
| binder in scFv | SKYLNWYQQKPDGTVKLLIYHTSRLHSGVPSRFSGSGSGTDYSLTI | |
| format (nfP2X₇ | SNLEQEDIATYFCQQGNTLPYTFGGGTKLEITGGGGSGGGGSGG | |
| epitope | GGSEVKLQESGPGLVAPSQSLSVTCTVSGVSLPDYGVSWIRQPP | |
| underlined) | RKGLEWLGVIWGSETTYYNSALKSRLTIIKDNSKSQVFLKMNSLQ | |
| CD19, FMC63, | TDDTAIYYCAKHYYYGGSYAMDYWGQGTSVTVSSHHHHHH | |
| B013-1_scFv_LH | | |
| E200 + CD19 | GHNYTTRNILPGLNITSGGGGSDIQMTQTTSSLSASLGDRVTISC | 43 |
| binder in scFv | RASQDISKYLNWYQQKPDGTVKLLIYHTSRLHSGVPSRFSGSGSG | |
| format (nfP2X₇ | TDYSLTISNLEQEDIATYFCQQGNTLPYTFGGGTKLEITGGGGSG | |
| epitope | GGGSGGGGSEVKLQESGPGLVAPSQSLSVTCTVSGVSLPDYGVS | |
| underlined) | WIRQPPRKGLEWLGVIWGSETTYYNSALKSRLTIIKDNSKSQVFL | |
| CD19, FMC63, | KMNSLQTDDTAIYYCAKHYYYGGSYAMDYWGQGTSVTVSSHHH | |
| B013-2_scFv_LH | HHH | |
| E200 + CD19 | GHNYTTRNILPGLNITSEVKLQESGPGLVAPSQSLSVTCTVSGVS | 44 |
| binder in scFv | LPDYGVSWIRQPPRKGLEWLGVIWGSETTYYNSALKSRLTIIKDN | |
| format (nfP2X₇ | SKSQVFLKMNSLQTDDTAIYYCAKHYYYGGSYAMDYWGQGTSVT | |
| epitope | VSSGGGGSGGGGSGGGGSDIQMTQTTSSLSASLGDRVTISCRA | |
| underlined) | SQDISKYLNWYQQKPDGTVKLLIYHTSRLHSGVPSRFSGSGSGT | |
| CD19, FMC63, | DYSLTISNLEQEDIATYFCQQGNTLPYTFGGGTKLEITHHHHHH | |
| B014-1_scFv_HL | | |
| E200 + CD19 | GHNYTTRNILPGLNITSGGGGSEVKLQESGPGLVAPSQSLSVTCT | 45 |
| binder in scFv | VSGVSLPDYGVSWIRQPPRKGLEWLGVIWGSETTYYNSALKSRL | |
| format (nfP2X₇ | TIIKDNSKSQVFLKMNSLQTDDTAIYYCAKHYYYGGSYAMDYWG | |
| epitope | QGTSVTVSSGGGGSGGGGSGGGGSDIQMTQTTSSLSASLGDRV | |
| underlined) | TISCRASQDISKYLNWYQQKPDGTVKLLIYHTSRLHSGVPSRFSG | |
| CD19, FMC63, | SGSGTDYSLTISNLEQEDIATYFCQQGNTLPYTFGGGTKLEITHHH | |
| B014-2_scFv_HL | HHH | |
| E200 + CD19 | EVKLQESGPGLVAPSQSLSVTCTVSGVSLPDYGVSWIRQPPRKG | 46 |
| binder in scFv | LEWLGVIWGSETTYYNSALKSRLTIIKDNSKSQVFLKMNSLQTDDT | |
| format (nfP2X₇ | AIYYCAKHYYYGGSYAMDYWGQGTSVTVSSGGGGSGGGGSGG | |
| epitope | GGSDIQMTQTTSSLSASLGDRVTISCRASQDISKYLNWYQQKPD | |
| underlined) | GTVKLLIYHTSRLHSGVPSRFSGSGSGTDYSLTISNLEQEDIATYF | |
| CD19, FMC63, | CQQGNTLPYTFGGGTKLEITGHNYTTRNILPGLNITSHHHHHH | |
| B015_scFv_HL | | |
| E200 + CD19 | DIQMTQTTSSLSASLGDRVTISCRASQDISKYLNWYQQKPDGTVK | 309 |
| binder in scFv | LLIYHTSRLHSGVPSRFSGSGSGTDYSLTISNLEQEDIATYFCQQG | |
| format (nfP2X₇ | NTLPYTFGGGTKLEITGGGGSGGGGSGGGGSEVKLQESGPGLV | |
| epitope | APSQSLSVTCTVSGVSLPDYGVSWIRQPPRKGLEWLGVIWGSET | |
| underlined) | TYYNSALKSRLTIIKDNSKSQVFLKMNSLQTDDTAIYYCAKHYYYG | |
| CD19, FMC63, | GSYAMDYWGQGTSVTVSSGHNYTTRNILPGLNITSHHHHHH | |
| B016_scFv_LH | | |
| E200 + CD19 | GHNYTTRNILPGLNITSDIQMTQTTSSLSASLGDRVTISCRASQDIS | 47 |
| binder in scFv | KYLNWYQQKPDGTVKLLIYHTSRLHSGVPSRFSGSGSGTDYSLTI | |
| format (nfP2X₇ | SNLEQEDIATYFCQQGNTLPYTFGGGTKLEITGGGGSGGGGSGG | |
| epitope | GGSEVKLQESGPGLVAPSQSLSVTCTVSGVSLPDYGVSWIRQPP | |
| underlined) | RKGLEWLGVIWGSETTYYNSALKSRLTIIKDNSKSQVFLKMNSLQ | |
| CD19, FMC63, | TDDTAIYYCAKHYYYGGSYAMDYWGQGTSVTVSSGHNYTTRNIL | |
| B017-1_scFv_LH | PGLNITSHHHHHH | |
| E200 + CD19 | GHNYTTRNILPGLNITSGGGGSDIQMTQTTSSLSASLGDRVTISCR | 48 |
| binder in scFv | ASQDISKYLNWYQQKPDGTVKLLIYHTSRLHSGVPSRFSGSGSG | |
| format (nfP2X₇ | TDYSLTISNLEQEDIATYFCQQGNTLPYTFGGGTKLEITGGGGSG | |
| epitope | GGGSGGGGSEVKLQESGPGLVAPSQSLSVTCTVSGVSLPDYGV | |
| underlined) | SWIRQPPRKGLEWLGVIWGSETTYYNSALKSRLTIIKDNSKSQVFL | |
| CD19, FMC63, | KMNSLQTDDTAIYYCAKHYYYGGSYAMDYWGQGTSVTVSSGHN | |
| B017-2_scFv_LH | YTTRNILPGLNITSHHHHHH | |
| E200 + CD19 | GHNYTTRNILPGLNITSEVKLQESGPGLVAPSQSLSVTCTVSGVSL | 49 |
| binder in scFv | PDYGVSWIRQPPRKGLEWLGVIWGSETTYYNSALKSRLTIIKDNS | |
| format (nfP2X₇ | KSQVFLKMNSLQTDDTAIYYCAKHYYYGGSYAMDYWGQGTSVT | |
| epitope | VSSGGGGSGGGGSGGGGSDIQMTQTTSSLSASLGDRVTISCRA | |
| underlined) | SQDISKYLNWYQQKPDGTVKLLIYHTSRLHSGVPSRFSGSGSGT | |
| CD19, FMC63, | DYSLTISNLEQEDIATYFCQQGNTLPYTFGGGTKLEITGHNYTTRN | |
| B018-1_scFv_HL | ILPGLNITSHHHHHH | |
| E200 + CD19 | GHNYTTRNILPGLNITSGGGGSEVKLQESGPGLVAPSQSLSVTCT | 50 |
| binder in scFv | VSGVSLPDYGVSWIRQPPRKGLEWLGVIWGSETTYYNSALKSRL | |
| format (nfP2X₇ | TIIKDNSKSQVFLKMNSLQTDDTAIYYCAKHYYYGGSYAMDYWG | |
| epitope | QGTSVTVSSGGGGSGGGGSGGGGSDIQMTQTTSSLSASLGDRV | |
| underlined) | TISCRASQDISKYLNWYQQKPDGTVKLLIYHTSRLHSGVPSRFSG | |
| CD19, FMC63, | SGSGTDYSLTISNLEQEDIATYFCQQGNTLPYTFGGGTKLEITGHN | |
| B018-2_scFv_HL | YTTRNILPGLNITSHHHHHH | |

Constructs based on Tafasitamab (for binding CD19)

| | | |
|---|---|---|
| E200 + CD19 | GHNYTTRNILPGLNITSDIVMTQSPATLSLSPGERATLSCRSSKSL | 51 |
| binder (nfP2X₇ | QNVNGNTYLYWFQQKPGQSPQLLIYRMSNLNSGVPDRFSGSGS | |
| epitope | GTEFTLTISSLEPEDFAVYYCMQHLEYPITFGAGTKLEIKRTVAAPS | |
| underlined) | VFIFPPSDEQLKSGTASVVCLLNNFYPREAKVQWKVDNALQSGN | |
| CD19, | SQESVTEQDSKDSTYSLSSTLTLSKADYEKHKVYACEVTHQGLSS | |
| Tafasitamab, | PVTKSFNRGECHHHHHH | |
| B020-1_Light | | |
| Chain | | |
| CD19, | EVQLVESGGGLVKPGGSLKLSCAASGYTFTSYVMHWVRQAPGK | 52 |
| Tafasitamab, | GLEWIGYINPYNDGTKYNEKFQGRVTISSDKSISTAYMELSSLRSE | |
| B020-2_Heavy | DTAMYYCARGTYYYGTRVFDYWGQGTLVTVSSASTKGPSVFPLA | |
| Chain | PSSKSTSGGTAALGCLVKDYFPEPVTVSWNSGALTSGVHTFPAV | |
| | LQSSGLYSLSSVVTVPSSSLGTQTYICNVNHKPSNTKVDKKVEPK | |
| | SCHHHHHH | |

Constructs for binding CD20

| | | |
|---|---|---|
| E200 + CD20 | GHNYTTRNILPGLNITSDIQMTQSPSSLSASVGDRVTITCRASSSV | 53 |
| binder (nfP2X₇ | SYMHWYQQKPGKAPKPLIYAPSNLASGVPSRFSGSGSGTDFTLTI | |
| epitope | SSLQPEDFATYYCQQWSFNPPTFGQGTKVEIKRTVAAPSVFIFPP | |
| underlined) | SDEQLKSGTASVVCLLNNFYPREAKVQWKVDNALQSGNSQESV | |
| CD20, | TEQDSKDSTYSLSSTLTLSKADYEKHKVYACEVTHQGLSSPVTKS | |
| Ocrelizumab, | FNRGECHHHHHH | |
| B021-1_Light | | |
| chain | | |
| CD20, | EVQLVESGGGLVQPGGSLRLSCAASGYTFTSYNMHWVRQAPGK | 54 |
| Ocrelizumab, | GLEWVGAIYPGNGDTSYNQKFKGRFTISVDKSKNTLYLQMNSLR | |
| B021-1_Heavy | AEDTAVYYCARVVYYSNSYWYFDVWGQGTLVTVSSASTKGPSV | |
| Chain | FPLAPSSKSTSGGTAALGCLVKDYFPEPVTVSWNSGALTSGVHT | |
| | FPAVLQSSGLYSLSSVVTVPSSSLGTQTYICNVNHKPSNTKVDKK | |
| | VEPKSCHHHHHH | |
| E200 + CD20 | GHNYTTRNILPGLNITSEIVLTQSPATLSLSPGERATLSCRASQSV | 55 |
| binder (nfP2X₇ | SSYLAWYQQKPGQAPRLLIYDASNRATGIPARFSGSGSGTDFTLT | |
| epitope | ISSLEPEDFAVYYCQQRSNWPITFGQGTRLEIKRTVAAPSVFIFPP | |
| underlined) | SDEQLKSGTASVVCLLNNFYPREAKVQWKVDNALQSGNSQESV | |
| CD20, | TEQDSKDSTYSLSSTLTLSKADYEKHKVYACEVTHQGLSSPVTKS | |
| Ofatumumab, | FNRGECHHHHHH | |
| B022-1_Light | | |
| Chain | | |
| CD20, | EVQLVESGGGLVQPGRSLRLSCAASGFTFNDYAMHWVRQAPGK | 56 |
| Ofatumumab, | GLEWVSTISWNSGSIGYADSVKGRFTISRDNAKKSLYLQMNSLRA | |
| B022-2_Heavy | EDTALYYCAKDIQYGNYYYGMDVWGQGTTVTVSSASTKGPSVFP | |
| Chain | LAPSSKSTSGGTAALGCLVKDYFPEPVTVSWNSGALTSGVHTFP | |
| | AVLQSSGLYSLSSVVTVPSSSLGTQTYICNVNHKPSNTKVDKKVE | |
| | PKSCHHHHHH | |

Constructs for binding CD22

| | | |
|---|---|---|
| E200 + CD22 | GHNYTTRNILPGLNITSDIQMIQSPSSLSASVGDRVTITCRASQTIW | 57 |
| binder (nfP2X₇ | SYLNWYRQRPGEAPNLLIYAASSLQSGVPSRFSGRGSGTDFTLTI | |
| epitope | SSLQAEDFATYYCQQSYSIPQTFGQGTKLEIKRTVAAPSVFIFPPS | |
| underlined) | DEQLKSGTASVVCLLNNFYPREAKVQWKVDNALQSGNSQESVT | |
| CD22, m971-L7, | EQDSKDSTYSLSSTLTLSKADYEKHKVYACEVTHQGLSSPVTKSF | |
| B023-1_LC | NRGECHHHHHH | |
| CD22, m971-L7, | QVQLQQSGPGMVKPSQTLSLTCAISGDSVSSNSVAWNWIRQSP | 58 |
| B023-2_Heavy | SRGLEWLGRTYYRSTWYNDYAVSMKSRITINPDTNKNQFSLQLN | |
| Chain | SVTPEDTAVYYCAREVTGDLEDAFDIWGQGTMVTVSSASTKGPS | |
| | VFPLAPSSKSTSGGTAALGCLVKDYFPEPVTVSWNSGALTSGVH | |
| | TFPAVLQSSGLYSLSSVVTVPSSSLGTQTYICNVNHKPSNTKVDK | |
| | KVEPKSCHHHHHH | |
| E200 + CD22 | GHNYTTRNILPGLNITSDVQVTQSPSSLSASVGDRVTITCRSSQSL | 59 |
| binder (nfP2X₇ | ANSYGNTFLSWYLHKPGKAPQLLIYGISNRFSGVPDRFSGSGSGT | |
| epitope | DFTLTISSLQPEDFATYYCLQGTHQPYTFGQGTKVEIKRTVAAPSV | |
| underlined) | FIFPPSDEQLKSGTASVVCLLNNFYPREAKVQWKVDNALQSGNS | |
| CD22, | QESVTEQDSKDSTYSLSSTLTLSKADYEKHKVYACEVTHQGLSSP | |
| Inotuzumab, | VTKSFNRGECHHHHHH | |
| B024-1_LC | | |
| CD22, | EVQLVQSGAEVKKPGASVKVSCKASGYRFTNYWIHWVRQAPGQ | 60 |
| Inotuzumab, | GLEWIGGINPGNNYATYRRKFQGRVTMTADTSTSTVYMELSSLR | |
| B024-2_HC | SEDTAVYYCTREGYGNYGAWFAYWGQGTLVTVSSASTKGPSVF | |
| | PLAPSSKSTSGGTAALGCLVKDYFPEPVTVSWNSGALTSGVHTF | |
| | PAVLQSSGLYSLSSVVTVPSSSLGTQTYICNVNHKPSNTKVDKKV | |
| | EPKSCHHHHHH | |

Constructs for binding CD79B

| | | |
|---|---|---|
| E200 + CD79B | GHNYTTRNILPGLNITSDIQLTQSPSSLSASVGDRVTITCKASQSV | 61 |
| binder (nfP2X₇ | DYEGDSFLNWYQQKPGKAPKLLIYAASNLESGVPSRFSGSGSGT | |
| epitope | DFTLTISSLQPEDFATYYCQQSNEDPLTFGQGTKVEIKRTVAAPSV | |
| underlined) | FIFPPSDEQLKSGTASVVCLLNNFYPREAKVQWKVDNALQSGNS | |
| CD79B, | QESVTEQDSKDSTYSLSSTLTLSKADYEKHKVYACEVTHQGLSSP | |
| Polatuzumab, | VTKSFNRGECHHHHHH | |
| B025-1_LC | | |
| CD79B, | EVQLVESGGGLVQPGGSLRLSCAASGYTFSSYWIEWVRQAPGK | 62 |
| Polatuzumab, | GLEWIGEILPGGGDTNYNEIFKGRATFSADTSKNTAYLQMNSLRA | |
| B025-2_HC | EDTAVYYCTRRVPIRLDYWGQGTLVTVSSASTKGPSVFPLAPSSK | |
| | STSGGTAALGCLVKDYFPEPVTVSWNSGALTSGVHTFPAVLQSS | |
| | GLYSLSSVVTVPSSSLGTQTYICNVNHKPSNTKVDKKVEPKSCHH | |
| | HHHH | |

Constructs for binding CD37

| | | |
|---|---|---|
| E200 + CD37 | GHNYTTRNILPGLNITSEIVLTQSPATLSLSPGERATLSCRASENV | 63 |
| binder (nfP2X₇ | YSYLAWYQQKPGQAPRLLIYFAKTLAEGIPARFSGSGSGTDFTLTI | |
| epitope | SSLEPEDFAVYYCQHHSDNPWTFGQGTKVEIKRTVAAPSVFIFPP | |
| underlined) | SDEQLKSGTASVVCLLNNFYPREAKVQWKVDNALQSGNSQESV | |
| CD37, | TEQDSKDSTYSLSSTLTLSKADYEKHKVYACEVTHQGLSSPVTKS | |
| Otlertuzumab, | FNRGECHHHHHH | |
| B026-1_LC | | |
| CD37, | EVQLVQSGAEVKKPGESLKISCKGSGYSFTGYNMNWVRQMPGK | 64 |
| Otlertuzumab, | GLEWMGNIDPYYGGTTYNRKFKGQVTISADKSISTAYLQWSSLKA | |
| B026-2_HC | SDTAMYYCARSVGPFDSWGQGTLVTVSSASTKGPSVFPLAPSSK | |
| | STSGGTAALGCLVKDYFPEPVTVSWNSGALTSGVHTFPAVLQSS | |
| | GLYSLSSVVTVPSSSLGTQTYICNVNHKPSNTKVDKKVEPKSCHH | |
| | HHHH | |

Constructs for binding CD38

| | | |
|---|---|---|
| E200 + CD38 | GHNYTTRNILPGLNITSEIVLTQSPATLSLSPGERATLSCRASQSV | 65 |
| binder (nfP2X₇ | SSYLAWYQQKPGQAPRLLIYDASNRATGIPARFSGSGSGTDFTLT | |
| epitope | ISSLEPEDFAVYYCQQRSNWPPTFGQGTKVEIKRTVAAPSVFIFP | |
| underlined) | PSDEQLKSGTASVVCLLNNFYPREAKVQWKVDNALQSGNSQES | |
| CD38, | VTEQDSKDSTYSLSSTLTLSKADYEKHKVYACEVTHQGLSSPVTK | |
| Daratumumab, | SFNRGECHHHHHH | |
| B027-1_LC | | |
| CD38, | EVQLLESGGGLVQPGGSLRLSCAVSGFTFNSFAMSWVRQAPGK | 66 |
| Daratumumab, | GLEWVSAISGSGGGTYYADSVKGRFTISRDNSKNTLYLQMNSLR | |
| B027-2_HC | AEDTAVYFCAKDKILWFGEPVFDYWGQGTLVTVSSASTKGPSVF | |
| | PLAPSSKSTSGGTAALGCLVKDYFPEPVTVSWNSGALTSGVHTF | |
| | PAVLQSSGLYSLSSVVTVPSSSLGTQTYICNVNHKPSNTKVDKKV | |
| | EPKSCHHHHHH | |

Constructs for binding CD70

| | | |
|---|---|---|
| E200 + CD70 | GHNYTTRNILPGLNITSQAVVTQEPSLTVSPGGTVTLTCGLKSGS | 67 |
| binder (nfP2X₇ | VTSDNFPTWYQQTPGQAPRLLIYNTNTRHSGVPDRFSGSILGNK | |
| epitope | AALTITGAQADDEAEYFCALFISNPSVEFGGGTQLTVLKRTVAAPS | |
| underlined) | VFIFPPSDEQLKSGTASVVCLLNNFYPREAKVQWKVDNALQSGN | |
| CD70, | SQESVTEQDSKDSTYSLSSTLTLSKADYEKHKVYACEVTHQGLSS | |
| Cusatuzumab, | PVTKSFNRGECHHHHHH | |
| B028-1_LC | | |
| CD70, | EVQLVESGGGLVQPGGSLRLSCAASGFTFSVYYMNWVRQAPGK | 68 |
| Cusatuzumab, | GLEWVSDINNEGGTTYYADSVKGRFTISRDNSKNSLYLQMNSLR | |
| B028-2_HC | AEDTAVYYCARDAGYSNHVPIFDSWGQGTLVTVSSASTKGPSVF | |
| | PLAPSSKSTSGGTAALGCLVKDYFPEPVTVSWNSGALTSGVHTF | |
| | PAVLQSSGLYSLSSVVTVPSSSLGTQTYICNVNHKPSNTKVDKKV | |
| | EPKSCHHHHHH | |

Constructs for binding CD30

| | | |
|---|---|---|
| E200 + CD30 | GHNYTTRNILPGLNITSDIVLTQSPASLAVSLGQRATISCKASQSV | 69 |
| binder (nfP2X₇ | DFDGDSYMNWYQQKPGQPPKVLIYAASNLESGIPARFSGSGSGT | |
| epitope | DFTLNIHPVEEEDAATYYCQQSNEDPWTFGGGTKLEIKRTVAAPS | |
| underlined) | VFIFPPSDEQLKSGTASVVCLLNNFYPREAKVQWKVDNALQSGN | |
| CD30, | SQESVTEQDSKDSTYSLSSTLTLSKADYEKHKVYACEVTHQGLSS | |
| Brentuximab, | PVTKSFNRGECHHHHHH | |
| B029-1_LC | | |
| CD30, | QIQLQQSGPEVVKPGASVKISCKASGYTFTDYYITWVKQKPGQGL | 70 |
| Brentuximab, | EWIGWIYPGSGNTKYNEKFKGKATLTVDTSSSTAFMQLSSLTSED | |
| B029-2_HC | TAVYFCANYGNYWFAYWGQGTQVTVSAASTKGPSVFPLAPSSK | |
| | STSGGTAALGCLVKDYFPEPVTVSWNSGALTSGVHTFPAVLQSS | |
| | GLYSLSSVVTVPSSSLGTQTYICNVNHKPSNTKVDKKVEPKSCHH | |
| | HHHH | |

Constructs for binding CD33

| | | |
|---|---|---|
| E200 + CD33 | GHNYTTRNILPGLNITSDIQLTQSPSTLSASVGDRVTITCRASESLD | 71 |
| binder (nfP2X₇ | NYGIRFLTWFQQKPGKAPKLLMYAASNQGSGVPSRFSGSGSGT | |
| epitope | EFTLTISSLQPDDFATYYCQQTKEVPWSFGQGTKVEVKRTVAAPS | |
| underlined) | VFIFPPSDEQLKSGTASVVCLLNNFYPREAKVQWKVDNALQSGN | |
| CD33, | SQESVTEQDSKDSTYSLSSTLTLSKADYEKHKVYACEVTHQGLSS | |
| Gemtuzumab, | PVTKSFNRGECHHHHHH | |
| B030-1_LC | | |
| CD33, | EVQLVQSGAEVKKPGSSVKVSCKASGYTITDSNIHWVRQAPGQS | 72 |
| Gemtuzumab, | LEWIGYIYPYNGGTDYNQKFKNRATLTVDNPTNTAYMELSSLRSE | |
| B030-2_Heavy | DTAFYYCVNGNPWLAYWGQGTLVTVSSASTKGPSVFPLAPSSKS | |
| Chain | TSGGTAALGCLVKDYFPEPVTVSWNSGALTSGVHTFPAVLQSSG | |
| | LYSLSSVVTVPSSSLGTQTYICNVNHKPSNTKVDKKVEPKSCHHH | |
| | HHH | |
| E200 + CD33 | GHNYTTRNILPGLNITSDIQMTQSPSSLSASVGDRVTITCRASESV | 73 |
| binder (nfP2X₇ | DNYGISFMNWFQQKPGKAPKLLIYAASNQGSGVPSRFSGSGSGT | |
| epitope | DFTLTISSLQPDDFATYYCQQSKEVPWTFGQGTKVEIKRTVAAPS | |
| underlined) | VFIFPPSDEQLKSGTASVVCLLNNFYPREAKVQWKVDNALQSGN | |
| CD33, | SQESVTEQDSKDSTYSLSSTLTLSKADYEKHKVYACEVTHQGLSS | |
| Lintuzumab, | PVTKSFNRGECHHHHHH | |
| B031-1_LC | | |
| CD33, | QVQLVQSGAEVKKPGSSVKVSCKASGYTFTDYNMHWVRQAPG | 74 |
| Lintuzumab, | QGLEWIGYIYPYNGGTGYNQKFKSKATITADESTNTAYMELSSLR | |
| B031-2_HC | SEDTAVYYCARGRPAMDYWGQGTLVTVSSASTKGPSVFPLAPS | |
| | SKSTSGGTAALGCLVKDYFPEPVTVSWNSGALTSGVHTFPAVLQ | |
| | SSGLYSLSSVVTVPSSSLGTQTYICNVNHKPSNTKVDKKVEPKSC | |
| | HHHHHH | |

Constructs for binding Her2

| | | |
|---|---|---|
| E200 + Her2 | GHNYTTRNILPGLNITSDIQMTQSPSSLSASVGDRVTITCKASQDV | 75 |
| binder (nfP2X₇ | SIGVAWYQQKPGKAPKLLIYSASYRYTGVPSRFSGSGSGTDFTLT | |
| epitope | ISSLQPEDFATYYCQQYYIYPYTFGQGTKVEIKRTVAAPSVFIFPPS | |
| underlined) | DEQLKSGTASVVCLLNNFYPREAKVQWKVDNALQSGNSQESVT | |
| Her2, | EQDSKDSTYSLSSTLTLSKADYEKHKVYACEVTHQGLSSPVTKSF | |
| Pertuzumab, | NRGECHHHHHH | |
| B032-1_LC | | |
| Her2, | EVQLVESGGGLVQPGGSLRLSCAASGFTFTDYTMDWVRQAPGK | 76 |
| Pertuzumab, | GLEWVADVNPNSGGSIYNQRFKGRFTLSVDRSKNTLYLQMNSLR | |
| B032-2_HC | AEDTAVYYCARNLGPSFYFDYWGQGTLVTVSSASTKGPSVFPLA | |
| | PSSKSTSGGTAALGCLVKDYFPEPVTVSWNSGALTSGVHTFPAV | |
| | LQSSGLYSLSSVVTVPSSSLGTQTYICNVNHKPSNTKVDKKVEPK | |
| | SCHHHHHH | |
| E200 + Her2 | GHNYTTRNILPGLNITSDIQMTQSPSSLSASVGDRVTITCRASQDV | 77 |
| binder (nfP2X₇ | NTAVAWYQQKPGKAPKLLIYSASFLYSGVPSRFSGSRSGTDFTLT | |
| epitope | ISSLQPEDFATYYCQQHYTTPPTFGQGTKVEIKRTVAAPSVFIFPP | |
| underlined) | SDEQLKSGTASVVCLLNNFYPREAKVQWKVDNALQSGNSQESV | |
| Her2, | TEQDSKDSTYSLSSTLTLSKADYEKHKVYACEVTHQGLSSPVTKS | |
| Trastuzumab, | FNRGECHHHHHH | |
| B033-1_LC | | |
| Her2, | EVQLVESGGGLVQPGGSLRLSCAASGFNIKDTYIHWVRQAPGKG | 78 |
| Trastuzumab, | LEWVARIYPTNGYTRYADSVKGRFTISADTSKNTAYLQMNSLRAE | |
| B033-2_HC | DTAVYYCSRWGGDGFYAMDYWGQGTLVTVSSASTKGPSVFPLA | |
| | PSSKSTSGGTAALGCLVKDYFPEPVTVSWNSGALTSGVHTFPAV | |
| | LQSSGLYSLSSVVTVPSSSLGTQTYICNVNHKPSNTKVDKKVEPK | |
| | SCHHHHHH | |

Constructs for binding EGFR

| | | |
|---|---|---|
| E200 + EGFR | GHNYTTRNILPGLNITSEIVMTQSPATLSLSPGERATLSCRASQSV | 79 |
| binder (nfP2X₇ | SSYLAWYQQKPGQAPRLLIYDASNRATGIPARFSGSGSGTDFTLT | |
| epitope | ISSLEPEDFAVYYCHQYGSTPLTFGGGTKAEIKRTVAAPSVFIFPP | |
| underlined) | SDEQLKSGTASVVCLLNNFYPREAKVQWKVDNALQSGNSQESV | |
| EGFR, | TEQDSKDSTYSLSSTLTLSKADYEKHKVYACEVTHQGLSSPVTKS | |
| Necitumumab, | FNRGECHHHHHH | |
| B034-1_LC | | |
| EGFR, | QVQLQESGPGLVKPSQTLSLTCTVSGGSISSGDYYWSWIRQPPG | 80 |
| Necitumumab, | KGLEWIGYIYYSGSTDYNPSLKSRVTMSVDTSKNQFSLKVNSVTA | |
| B034-2_HC | ADTAVYYCARVSIFGVGTFDYWGQGTLVTVSSASTKGPSVFPLA | |
| | PSSKSTSGGTAALGCLVKDYFPEPVTVSWNSGALTSGVHTFPAV | |
| | LQSSGLYSLSSVVTVPSSSLGTQTYICNVNHKPSNTKVDKKVEPK | |
| | SCHHHHHH | |
| E200 + EGFR | GHNYTTRNILPGLNITSDIQMTQSPSSLSASVGDRVTITCSASSSV | 81 |
| binder (nfP2X₇ | TYMYWYQQKPGKAPKLLIYDTSNLASGVPSRFSGSGSGTDYTFTI | |
| epitope | SSLQPEDIATYYCQQWSSHIFTFGQGTKVEIKRTVAAPSVFIFPPS | |
| underlined) | DEQLKSGTASVVCLLNNFYPREAKVQWKVDNALQSGNSQESVT | |
| EGFR, | EQDSKDSTYSLSSTLTLSKADYEKHKVYACEVTHQGLSSPVTKSF | |
| Matuzumab, | NRGECHHHHHH | |
| B035-1_LC | | |
| EGFR, | QVQLVQSGAEVKKPGASVKVSCKASGYTFTSHWMHWVRQAPG | 82 |
| Matuzumab, | QGLEWIGEFNPSNGRTNYNEKFKSKATMTVDTSTNTAYMELSSL | |
| B035-2_HC | RSEDTAVYYCASRDYDYDGRYFDYWGQGTLVTVSSASTKGPSV | |
| | FPLAPSSKSTSGGTAALGCLVKDYFPEPVTVSWNSGALTSGVHT | |
| | FPAVLQSSGLYSLSSVVTVPSSSLGTQTYICNVNHKPSNTKVDKK | |
| | VEPKSCHHHHHH | |
| E200 + EGFR | GHNYTTRNILPGLNITSDIQMTQSPSSLSASVGDRVTITCQASQDI | 83 |
| binder (nfP2X₇ | SNYLNWYQQKPGKAPKLLIYDASNLETGVPSRFSGSGSGTDFTF | |
| epitope | TISSLQPEDIATYFCQHFDHLPLAFGGGTKVEIKRTVAAPSVFIFPP | |
| underlined) | SDEQLKSGTASVVCLLNNFYPREAKVQWKVDNALQSGNSQESV | |
| EGFR, | TEQDSKDSTYSLSSTLTLSKADYEKHKVYACEVTHQGLSSPVTKS | |
| Panitumumab, | FNRGECHHHHHH | |
| B036-1_LC | | |
| EGFR, | QVQLQESGPGLVKPSETLSLTCTVSGGSVSSGDYYWTWIRQSP | 84 |
| Panitumumab, | GKGLEWIGHIYYSGNTNYNPSLKSRLTISIDTSKTQFSLKLSSVTAA | |
| B036-2_HC | DTAIYYCVRDRVTGAFDIWGQGTMVTVSSASTKGPSVFPLAPSSK | |
| | STSGGTAALGCLVKDYFPEPVTVSWNSGALTSGVHTFPAVLQSS | |
| | GLYSLSSVVTVPSSSLGTQTYICNVNHKPSNTKVDKKVEPKSCHH | |
| | HHHH | |

Constructs for binding CD276

| | | |
|---|---|---|
| E200 + CD276 | GHNYTTRNILPGLNITSEIVMTQSPATLSVSPGERVTLSCRASQSI | 85 |
| binder (nfP2X₇ | SDYLYWYQQKSHESPRLLIKYASQSISGIPARFSGSGSGSEFTLTI | |
| epitope | NSVEPEDVGVYYCQNGHSFPLTFGQGTKLELKRTVAAPSVFIFPP | |
| underlined) | SDEQLKSGTASVVCLLNNFYPREAKVQWKVDNALQSGNSQESV | |
| CD276, hu8H9- | TEQDSKDSTYSLSSTLTLSKADYEKHKVYACEVTHQGLSSPVTKS | |
| 6m, B037-1_LC | FNRGECHHHHHH | |
| CD276, hu8H9- | QVQLVQSGAEVVKPGASVKLSCKTSGYTFTNYDINWVRQRPGQ | 86 |
| 6m, B037-2_HC | GLEWIGWIFPGDDSTQYNEKFKGKATLTTDTSTSTAYMELSSLRS | |
| | EDTAVYFCARQTTGTWFAYWGQGTLVTVSSASTKGPSVFPLAPS | |
| | SKSTSGGTAALGCLVKDYFPEPVTVSWNSGALTSGVHTFPAVLQ | |
| | SSGLYSLSSVVTVPSSSLGTQTYICNVNHKPSNTKVDKKVEPKSC | |
| | HHHHHH | |

Constructs for binding GD2

| | | |
|---|---|---|
| E200 + GD2 binder | GHNYTTRNILPGLNITSKIVMTQTPATLSVSAGERVTITCKASQSV | 87 |
| (nfP2X₇ epitope | SNHVTWYQQKPGQAPRLLIYSASNRYSGVPARFSGSGYGTEFTF | |
| underlined) | TISSVQSEDFAVYFCQQDYSSFGQGTKLEIKRTVAAPSVFIFPPSD | |
| GD2, Naxitamab, | EQLKSGTASVVCLLNNFYPREAKVQWKVDNALQSGNSQESVTE | |
| B038-1_LC | QDSKDSTYSLSSTLTLSKADYEKHKVYACEVTHQGLSSPVTKSFN | |
| | RGECHHHHHH | |
| GD2, Naxitamab, | QVQLVESGPGVVQPGRSLRLSCAVSGFSVTNYGVHWVRQPPGK | 88 |
| B038-2_HC | GLEWLGVIWAGGITNYNSSVKGRLTISKDNSKNTVYLQMNSLRAE | |
| | DTAVYYCASRGGHYGYALDYWGQGTLVTVSSASTKGPSVFPLAP | |
| | SSKSTSGGTAALGCLVKDYFPEPVTVSWNSGALTSGVHTFPAVL | |
| | QSSGLYSLSSVVTVPSSSLGTQTYICNVNHKPSNTKVDKKVEPKS | |
| | CHHHHHH | |

Constructs for binding BCMA

| | | |
|---|---|---|
| E200 + BCMA | GHNYTTRNILPGLNITSDIQMTQSPSSLSASVGDRVTITCSASQDI | 89 |
| binder (nfP2X₇ | SNYLNWYQQKPGKAPKLLIYYTSNLHSGVPSRFSGSGSGTDFTL | |
| epitope | TISSLQPEDFATYYCQQYRKLPWTFGQGTKLEIKRTVAAPSVFIFP | |
| underlined) | PSDEQLKSGTASVVCLLNNFYPREAKVQWKVDNALQSGNSQES | |
| BCMA, clone CA8 | VTEQDSKDSTYSLSSTLTLSKADYEKHKVYACEVTHQGLSSPVTK | |
| J9M0, B039-1_LC | SFNRGECHHHHHH | |
| BCMA, clone CA8 | QVQLVQSGAEVKKPGSSVKVSCKGSGYTFTNYWMHWVRQAPG | 90 |
| J9M0, B039- | QGLEWIGATYRGHSDTYYNQKFKGRATLTADTSTSTAYMELSSL | |
| 2_HC | RSEDTAVYYCTRGAIYDGYDVLDNWGQGTLVTVSSASTKGPSVF | |
| | PLAPSSKSTSGGTAALGCLVKDYFPEPVTVSWNSGALTSGVHTF | |
| | PAVLQSSGLYSLSSVVTVPSSSLGTQTYICNVNHKPSNTKVDKKV | |
| | EPKSCHHHHHH | |

Constructs for binding CD371

| | | |
|---|---|---|
| E200 + CD371 | GHNYTTRNILPGLNITSDIVMTQSPSSVSASVGDRVTITCRASQDI | 91 |
| binder (nfP2X₇ | SSWLAWYQQKPGKAPKLLIYAASSLQSGVPSRFNGSGSGTDFTL | |
| epitope | TISSLQPEDFATYYCQQSYSTPLTFGGGTKVEIKRTVAAPSVFIFP | |
| underlined) | PSDEQLKSGTASVVCLLNNFYPREAKVQWKVDNALQSGNSQES | |
| US10568947_CA | VTEQDSKDSTYSLSSTLTLSKADYEKHKVYACEVTHQGLSSPVTK | |
| R9, B040-1_LC | SFNRGECHHHHHH | |
| CD371, | QVQLVQSGAEVKEPGASVKVSCKAPANTFSDHVMHWVRQAPG | 92 |
| US10568947_CA | QRFEWMGYIHAANGGTHYSQKFQDRVTITRDTSANTVYMDLSSL | |
| R9, B040-2_HC | RSEDTAVYYCARGGYNSDAFDIWGQGTMVTVSSASTKGPSVFPL | |
| | APSSKSTSGGTAALGCLVKDYFPEPVTVSWNSGALTSGVHTFPA | |
| | VLQSSGLYSLSSVVTVPSSSLGTQTYICNVNHKPSNTKVDKKVEP | |
| | KSCHHHHHH | |

Constructs for binding CD135

| | | |
|---|---|---|
| E200 + CD135 | GHNYTTRNILPGLNITSDIVLTQSPATLSVTPGDSVSLSCRASQSIS | 93 |
| binder (nfP2X₇ | NNLHWYQQKSHESPRLLIKYASQSISGIPSRFSGSGSGTDFTLSIN | |
| epitope | SVETEDFGVYFCQQSNTWPYTFGGGTKLEIKRTVAAPSVFIFPPS | |
| underlined) | DEQLKSGTASVVCLLNNFYPREAKVQWKVDNALQSGNSQESVT | |
| CD135, clone | EQDSKDSTYSLSSTLTLSKADYEKHKVYACEVTHQGLSSPVTKSF | |
| 4G8, B041-1_LC | NRGECHHHHHH | |
| CD135, clone | QVQLQQPGAELVKPGASLKLSCKSSGYTFTSYWMHWVRQRPGH | 94 |
| 4G8, B041-2_HC | GLEWIGEIDPSDSYKDYNQKFKDKATLTVDRSSNTAYMHLSSLTS | |
| | DDSAVYYCARAITTTPFDFWGQGTTLTVSSASTKGPSVFPLAPSS | |
| | KSTSGGTAALGCLVKDYFPEPVTVSWNSGALTSGVHTFPAVLQS | |
| | SGLYSLSSVVTVPSSSLGTQTYICNVNHKPSNTKVDKKVEPKSCH | |
| | HHHHH | |

Constructs for binding CD123

| | | |
|---|---|---|
| E200 + CD123 | GHNYTTRNILPGLNITSDIVLTQSPASLAVSLGQRATISCRASESVD | 95 |
| binder (nfP2X₇ | NYGNTFMHWYQQKPGQPPKLLIYRASNLESGIPARFSGSGSRTD | |
| epitope | FTLTINPVEADDVATYYCQQSNEDPPTFGAGTKLELKRTVAAPSV | |
| underlined) | FIFPPSDEQLKSGTASVVCLLNNFYPREAKVQWKVDNALQSGNS | |
| CD123, clone | QESVTEQDSKDSTYSLSSTLTLSKADYEKHKVYACEVTHQGLSSP | |
| 32716, B042- | VTKSFNRGECHHHHHH | |
| 1 LC | | |
| CD123, clone | QIQLVQSGPELKKPGETVKISCKASGYIFTNYGMNWVKQAPGKSF | 96 |
| 32716, B042- | KWMGWINTYTGESTYSADFKGRFAFSLETSASTAYLHINDLKNED | |
| 2_HC | TATYFCARSGGYDPMDYWGQGTSVTVSSASTKGPSVFPLAPSS | |
| | KSTSGGTAALGCLVKDYFPEPVTVSWNSGALTSGVHTFPAVLQS | |
| | SGLYSLSSVVTVPSSSLGTQTYICNVNHKPSNTKVDKKVEPKSCH | |
| | HHHHH | |

Constructs for binding CD105

| | | |
|---|---|---|
| E200 + CD105 | GHNYTTRNILPGLNITSQIVLSQSPAILSASPGEKVTMTCRASSSV | 97 |
| binder (nfP2X₇ | SYMHWYQQKPGSSPKPWIYATSNLASGVPVRFSGSGSGTSYSL | |
| epitope | TISRVEAEDAATYYCQQWSSNPLTFGAGTKLELKRTVAAPSVFIF | |
| underlined) | PPSDEQLKSGTASVVCLLNNFYPREAKVQWKVDNALQSGNSQE | |
| CD105, | SVTEQDSKDSTYSLSSTLTLSKADYEKHKVYACEVTHQGLSSPVT | |
| Carotuximab, | KSFNRGECHHHHHH | |
| B043-1_LC | | |
| CD105, | EVKLEESGGGLVQPGGSMKLSCAASGFTFSDAWMDWVRQSPE | 98 |
| Carotuximab, | KGLEWVAEIRSKASNHATYYAESVKGRFTISRDDSKSSVYLQMNS | |
| B043-2_HC | LRAEDTGIYYCTRWRRFFDSWGQGTTLTVSSASTKGPSVFPLAP | |
| | SSKSTSGGTAALGCLVKDYFPEPVTVSWNSGALTSGVHTFPAVL | |
| | QSSGLYSLSSVVTVPSSSLGTQTYICNVNHKPSNTKVDKKVEPKS | |
| | CHHHHHH | |

Constructs for binding ROR-1

| | | |
|---|---|---|
| E200 + ROR-1 | GHNYTTRNILPGLNITSEIVLSQSPAITAASLGQKVTITCSASSNVS | 99 |
| binder (nfP2X₇ | YIHWYQQRSGTSPRPWIYEISKLASGVPVRFSGSGSGTSYSLTIS | |
| epitope | SMEAEDAAIYYCQQWNYPLITFGSGTKLEIQRTVAAPSVFIFPPSD | |
| underlined) ROR- | EQLKSGTASVVCLLNNFYPREAKVQWKVDNALQSGNSQESVTE | |
| 1, clone D10v3, | QDSKDSTYSLSSTLTLSKADYEKHKVYACEVTHQGLSSPVTKSFN | |
| B044-1_LC | RGECHHHHHH | |
| ROR-1, clone | QVQLKESGPGLVAPSQTLSITCTVSGFSLTSYGVHWVRQPPGKG | 100 |
| D10v3, B044- | LEWLGVIWAGGFTNYNSALKSRLSISKDNSKSQVLLKMTSLQTDD | |
| 2_HC | TAMYYCARRGSSYSMDYWGQGTSVTVSSASTKGPSVFPLAPSS | |
| | KSTSGGTAALGCLVKDYFPEPVTVSWNSGALTSGVHTFPAVLQS | |
| | SGLYSLSSVVTVPSSSLGTQTYICNVNHKPSNTKVDKKVEPKSCH | |
| | HHHHH | |

Constructs for binding PD-L1

| | | |
|---|---|---|
| E200 + PD-L1 | GHNYTTRNILPGLNITSDIQMTQSPSSLSASVGDRVTITCRASQDV | 101 |
| binder (nfP2X₇ | STAVAWYQQKPGKAPKLLIYSASFLYSGVPSRFSGSGSGTDFTLT | |
| epitope | ISSLQPEDFATYYCQQYLYHPATFGQGTKVEIKRTVAAPSVFIFPP | |
| underlined) PD- | SDEQLKSGTASVVCLLNNFYPREAKVQWKVDNALQSGNSQESV | |
| L1, Atezolizumab, | TEQDSKDSTYSLSSTLTLSKADYEKHKVYACEVTHQGLSSPVTKS | |
| B045-1_LC | FNRGECHHHHHH | |
| PD-L1, | EVQLVESGGGLVQPGGSLRLSCAASGFTFSDSWIHWVRQAPGK | 102 |
| Atezolizumab, | GLEWVAWISPYGGSTYYADSVKGRFTISADTSKNTAYLQMNSLR | |
| B045-2_HC | AEDTAVYYCARRHWPGGFDYWGQGTLVTVSSASTKGPSVFPLA | |
| | PSSKSTSGGTAALGCLVKDYFPEPVTVSWNSGALTSGVHTFPAV | |
| | LQSSGLYSLSSVVTVPSSSLGTQTYICNVNHKPSNTKVDKKVEPK | |
| | SCHHHHHH | |

Constructs for binding MET-R

| | | |
|---|---|---|
| E200 + MET-R | GHNYTTRNILPGLNITSDIQMTQSPSSLSASVGDRVTITCKSSQSL | 103 |
| binder (nfP2X₇ | LYTSSQKNYLAWYQQKPGKAPKLLIYWASTRESGVPSRFSGSGS | |
| epitope | GTDFTLTISSLQPEDFATYYCQQYYAYPWTFGQGTKVEIKRTVAA | |
| underlined) MET- | PSVFIFPPSDEQLKSGTASVVCLLNNFYPREAKVQWKVDNALQS | |
| R, Onartuzumab, | GNSQESVTEQDSKDSTYSLSSTLTLSKADYEKHKVYACEVTHQG | |
| B046-1_LC | LSSPVTKSFNRGECHHHHHH | |
| MET-R, | EVQLVESGGGLVQPGGSLRLSCAASGYTFTSYWLHWVRQAPGK | 104 |
| Onartuzumab, | GLEWVGMIDPSNSDTRFNPNFKDRFTISADTSKNTAYLQMNSLR | |
| B046-2_HC | AEDTAVYYCATYRSYVTPLDYWGQGTLVTVSSASTKGPSVFPLA | |
| | PSSKSTSGGTAALGCLVKDYFPEPVTVSWNSGALTSGVHTFPAV | |
| | LQSSGLYSLSSVVTVPSSSLGTQTYICNVNHKPSNTKVDKKVEPK | |
| | SCHHHHHH | |

Constructs for binding PDGFRalpha

| | | |
|---|---|---|
| E200 + PDGFR | GHNYTTRNILPGLNITSDIQMTQSPSSLSASVGDRVSITCRPSQSF | 105 |
| binder (nfP2X₇ | SRYINWYQQKPGKAPKLLIHAASSLVGGVPSRFSGSGSGTDFTLT | |
| epitope | ISSLQPEDFATYYCQQTYSNPPITFGQGTRLEMKRTVAAPSVFIFP | |
| underlined) | PSDEQLKSGTASVVCLLNNFYPREAKVQWKVDNALQSGNSQES | |
| PDGFRalpha, | VTEQDSKDSTYSLSSTLTLSKADYEKHKVYACEVTHQGLSSPVTK | |
| Tovetumab, | SFNRGECHHHHHH | |
| B047-1_LC | | |
| PDGFRalpha, | QVQLVESGGGLVKPGGSLRLSCAASGFTFSDYYMNWIRQAPGK | 106 |
| Tovetumab, | GLEWVSYISSSGSIIYYADSVKGRFTISRDNAKNSLYLQMNSLRAE | |
| B047-2_HC | DTAVYYCAREGRIAARGMDVWGQGTTVTVSSASTKGPSVFPLAP | |
| | SSKSTSGGTAALGCLVKDYFPEPVTVSWNSGALTSGVHTFPAVL | |
| | QSSGLYSLSSVVTVPSSSLGTQTYICNVNHKPSNTKVDKKVEPKS | |
| | CHHHHHH | |
| E200 + PDGFR | GHNYTTRNILPGLNITSEIVLTQSPATLSLSPGERATLSCRASQSV | 107 |
| binder (nfP2X₇ | SSYLAWYQQKPGQAPRLLIYDASNRATGIPARFSGSGSGTDFTLT | |
| epitope | ISSLEPEDFAVYYCQQRSNWPPAFGQGTKVEIKRTVAAPSVFIFP | |
| underlined) | PSDEQLKSGTASVVCLLNNFYPREAKVQWKVDNALQSGNSQES | |
| PDGFRalpha, | VTEQDSKDSTYSLSSTLTLSKADYEKHKVYACEVTHQGLSSPVTK | |
| Olaratumab, | SFNRGECHHHHHH | |
| B048-1_LC | | |
| PDGFRalpha, | QLQLQESGPGLVKPSETLSLTCTVSGGSINSSSYYWGWLRQSPG | 108 |
| Olaratumab, | KGLEWIGSFFYTGSTYYNPSLRSRLTISVDTSKNQFSLMLSSVTAA | |
| B048-2_HC | DTAVYYCARQSTYYYGSGNYYGWFDRWDQGTLVTVSSASTKGP | |
| | SVFPLAPSSKSTSGGTAALGCLVKDYFPEPVTVSWNSGALTSGV | |
| | HTFPAVLQSSGLYSLSSVVTVPSSSLGTQTYICNVNHKPSNTKVD | |
| | KKVEPKSCHHHHHH | |

Constructs for binding Her3

| | | |
|---|---|---|
| E200 + Her3 | GHNYTTRNILPGLNITSQSALTQPASVSGSPGQSITISCTGTSSDV | 109 |
| binder (nfP2X₇ | GSYNVVSWYQQHPGKAPKLIIYEVSQRPSGVSNRFSGSKSGNTA | |
| epitope | SLTISGLQTEDEADYYCCSYAGSSIFVIFGGGTKVTVLRTVAAPSV | |
| underlined) Her3, | FIFPPSDEQLKSGTASVVCLLNNFYPREAKVQWKVDNALQSGNS | |
| Seribantumab, | QESVTEQDSKDSTYSLSSTLTLSKADYEKHKVYACEVTHQGLSSP | |
| B049-1_LC | VTKSFNRGECHHHHHH | |
| Her3, | EVQLLESGGGLVQPGGSLRLSCAASGFTFSHYVMAWVRQAPGK | 110 |
| Seribantumab, | GLEWVSSISSSGGWTLYADSVKGRFTISRDNSKNTLYLQMNSLR | |
| B049-2_HC | AEDTAVYYCTRGLKMATIFDYWGQGTLVTVSSASTKGPSVFPLAP | |
| | SSKSTSGGTAALGCLVKDYFPEPVTVSWNSGALTSGVHTFPAVL | |
| | QSSGLYSLSSVVTVPSSSLGTQTYICNVNHKPSNTKVDKKVEPKS | |
| | CHHHHHH | |

Constructs for binding FRalpha

| | | |
|---|---|---|
| E200 + FRa binder | GHNYTTRNILPGLNITSDIQLTQSPSSLSASVGDRVTITCSVSSSIS | 111 |
| (nfP2X₇ epitope | SNNLHWYQQKPGKAPKPWIYGTSNLASGVPSRFSGSGSGTDYT | |
| underlined) | FTISSLQPEDIATYYCQQWSSYPYMYTFGQGTKVEIKRTVAAPSV | |
| FRalpha, | FIFPPSDEQLKSGTASVVCLLNNFYPREAKVQWKVDNALQSGNS | |
| Farletuzumab, | QESVTEQDSKDSTYSLSSTLTLSKADYEKHKVYACEVTHQGLSSP | |
| B050-1_LC | VTKSFNRGECHHHHHH | |
| FRalpha, | EVQLVESGGGVVQPGRSLRLSCSASGFTFSGYGLSWVRQAPGK | 112 |
| Farletuzumab, | GLEWVAMISSGGSYTYYADSVKGRFAISRDNAKNTLFLQMDSLR | |
| B050-2_HC | PEDTGVYFCARHGDDPAWFAYWGQGTPVTVSSASTKGPSVFPL | |
| | APSSKSTSGGTAALGCLVKDYFPEPVTVSWNSGALTSGVHTFPA | |
| | VLQSSGLYSLSSVVTVPSSSLGTQTYICNVNHKPSNTKVDKKVEP | |
| | KSCHHHHHH | |

Constructs for binding GPC3

| | | |
|---|---|---|
| E200 + GPC3 | GHNYTTRNILPGLNITSDVVMTQSPLSLPVTPGEPASISCRSSQSL | 113 |
| binder (nfP2X₇ | VHSNRNTYLHWYLQKPGQSPQLLIYKVSNRFSGVPDRFSGSGSG | |
| epitope | TDFTLKISRVEAEDVGVYYCSQNTHVPPTFGQGTKLEIKRTVAAP | |
| underlined) | SVFIFPPSDEQLKSGTASVVCLLNNFYPREAKVQWKVDNALQSG | |
| GPC3, | NSQESVTEQDSKDSTYSLSSTLTLSKADYEKHKVYACEVTHQGL | |
| Codrituzumab, | SSPVTKSFNRGECHHHHHH | |
| B051-1_LC | | |
| GPC3, | QVQLVQSGAEVKKPGASVKVSCKASGYTFTDYEMHWVRQAPGQ | 114 |
| Codrituzumab, | GLEWMGALDPKTGDTAYSQKFKGRVTLTADKSTSTAYMELSSLT | |
| B051-2_HC | SEDTAVYYCTRFYSYTYWGQGTLVTVSSASTKGPSVFPLAPSSK | |
| | STSGGTAALGCLVKDYFPEPVTVSWNSGALTSGVHTFPAVLQSS | |
| | GLYSLSSVVTVPSSSLGTQTYICNVNHKPSNTKVDKKVEPKSCHH | |
| | HHHH | |

Constructs for binding SLAMF7

| | | |
|---|---|---|
| E200 + SLAMF7 | GHNYTTRNILPGLNITSDIQMTQSPSSLSASVGDRVTITCKASQDV | 115 |
| binder (nfP2X₇ | GIAVAWYQQKPGKVPKLLIYWASTRHTGVPDRFSGSGSGTDFTL | |
| epitope | TISSLQPEDVATYYCQQYSSYPYTFGQGTKVEIKRTVAAPSVFIFP | |
| underlined) | PSDEQLKSGTASVVCLLNNFYPREAKVQWKVDNALQSGNSQES | |
| SLAMF7, | VTEQDSKDSTYSLSSTLTLSKADYEKHKVYACEVTHQGLSSPVTK | |
| Elotuzumab, | SFNRGECHHHHHH | |
| B052-1_LC | | |
| SLAMF7, | EVQLVESGGGLVQPGGSLRLSCAASGFDFSRYWMSWVRQAPG | 116 |
| Elotuzumab, | KGLEWIGEINPDSSTINYAPSLKDKFIISRDNAKNSLYLQMNSLRAE | |
| B052-2_HC | DTAVYYCARPDGNYWYFDVWGQGTLVTVSSASTKGPSVFPLAP | |
| | SSKSTSGGTAALGCLVKDYFPEPVTVSWNSGALTSGVHTFPAVL | |
| | QSSGLYSLSSVVTVPSSSLGTQTYICNVNHKPSNTKVDKKVEPKS | |
| | CHHHHHH | |

Constructs for binding TNFRSF10B

| | | |
|---|---|---|
| E200 + | GHNYTTRNILPGLNITSDIQMTQSPSSLSASVGDRVTITCKASQDV | 117 |
| TNFRSF10B | GTAVAWYQQKPGKAPKLLIYWASTRHTGVPSRFSGSGSGTDFTL | |
| binder (nfP2X₇ | TISSLQPEDFATYYCQQYSSYRTFGQGTKVEIKRTVAAPSVFIFPP | |
| epitope | SDEQLKSGTASVVCLLNNFYPREAKVQWKVDNALQSGNSQESV | |
| underlined), | TEQDSKDSTYSLSSTLTLSKADYEKHKVYACEVTHQGLSSPVTKS | |
| Tigatuzumab, | FNRGECHHHHHH | |
| B053-1_LC | | |
| TNFRSF10B, | EVQLVESGGGLVQPGGSLRLSCAASGFTFSSYVMSWVRQAPGK | 118 |
| Tigatuzumab, | GLEWVATISSGGSYTYYPDSVKGRFTISRDNAKNTLYLQMNSLRA | |
| B053-2_HC | EDTAVYYCARRGDSMITTDYWGQGTLVTVSSASTKGPSVFPLAP | |
| | SSKSTSGGTAALGCLVKDYFPEPVTVSWNSGALTSGVHTFPAVL | |
| | QSSGLYSLSSVVTVPSSSLGTQTYICNVNHKPSNTKVDKKVEPKS | |
| | CHHHHHH | |

Constructs for binding GPNMB

| | | |
|---|---|---|
| E200 + GPNMB | GHNYTTRNILPGLNITSEIVMTQSPATLSVSPGERATLSCRASQSV | 119 |
| binder (nfP2X₇ | DNNLVWYQQKPGQAPRLLIYGASTRATGIPARFSGSGSGTEFTLT | |
| epitope | ISSLQSEDFAVYYCQQYNNWPPWTFGQGTKVEIKRTVAAPSVFIF | |
| underlined), | PPSDEQLKSGTASVVCLLNNFYPREAKVQWKVDNALQSGNSQE | |
| GPNMB, | SVTEQDSKDSTYSLSSTLTLSKADYEKHKVYACEVTHQGLSSPVT | |
| Glembatumumab, | KSFNRGECHHHHHH | |
| B054-1_LC | | |
| GPNMB, | QVQLQESGPGLVKPSQTLSLTCTVSGGSISSFNYYWSWIRHHPG | 120 |
| Glembatumumab, | KGLEWIGYIYYSGSTYSNPSLKSRVTISVDTSKNQFSLTLSSVTAA | |
| B054-2_HC | DTAVYYCARGYNWNYFDYWGQGTLVTVSSASTKGPSVFPLAPS | |
| | SKSTSGGTAALGCLVKDYFPEPVTVSWNSGALTSGVHTFPAVLQ | |
| | SSGLYSLSSVVTVPSSSLGTQTYICNVNHKPSNTKVDKKVEPKSC | |
| | HHHHHH | |

Constructs for binding VEGFR2

| | | |
|---|---|---|
| E200 + VEGFR2 | GHNYTTRNILPGLNITSDIQMTQSPSSVSASIGDRVTITCRASQGID | 121 |
| binder (nfP2X₇ | NWLGWYQQKPGKAPKLLIYDASNLDTGVPSRFSGSGSGTYFTLTI | |
| epitope | SSLQAEDFAVYFCQQAKAFPPTFGGGTKVDIKRTVAAPSVFIFPP | |
| underlined), | SDEQLKSGTASVVCLLNNFYPREAKVQWKVDNALQSGNSQESV | |
| Ramucirumab, | TEQDSKDSTYSLSSTLTLSKADYEKHKVYACEVTHQGLSSPVTKS | |
| B055-1_LC | FNRGECHHHHHH | |
| VEGFR2, | EVQLVQSGGGLVKPGGSLRLSCAASGFTFSSYSMNWVRQAPGK | 122 |
| Ramucirumab, | GLEWVSSISSSSSYIYYADSVKGRFTISRDNAKNSLYLQMNSLRA | |
| B055-2_HC | EDTAVYYCARVTDAFDIWGQGTMVTVSSASTKGPSVFPLAPSSK | |
| | STSGGTAALGCLVKDYFPEPVTVSWNSGALTSGVHTFPAVLQSS | |
| | GLYSLSSVVTVPSSSLGTQTYICNVNHKPSNTKVDKKVEPKSCHH | |
| | HHHH | |

Constructs for binding α4β7 &/or αEβ7

| | | |
|---|---|---|
| E200 + α4β7 and | GHNYTTRNILPGLNITSDIQMTQSPSSLSASVGDRVTITCRASESV | 123 |
| αEβ7binder | DDLLHWYQQKPGKAPKLLIKYASQSISGVPSRFSGSGSGTDFTLT | |
| (nfP2X₇ epitope | ISSLQPEDFATYYCQQGNSLPNTFGQGTKVEIKRTVAAPSVFIFPP | |
| underlined), | SDEQLKSGTASVVCLLNNFYPREAKVQWKVDNALQSGNSQESV | |
| Etrolizumab, | TEQDSKDSTYSLSSTLTLSKADYEKHKVYACEVTHQGLSSPVTKS | |
| B056-1_LC | FNRGECHHHHHH | |
| α4β7 & αEβ7, | EVQLVESGGGLVQPGGSLRLSCAASGFFITNNYWGWVRQAPGK | 124 |
| Etrolizumab, | GLEWVGYISYSGSTSYNPSLKSRFTISRDTSKNTFYLQMNSLRAE | |
| B056-2_HC | DTAVYYCARTGSSGYFDFWGQGTLVTVSSASTKGPSVFPLAPSS | |
| | KSTSGGTAALGCLVKDYFPEPVTVSWNSGALTSGVHTFPAVLQS | |
| | SGLYSLSSVVTVPSSSLGTQTYICNVNHKPSNTKVDKKVEPKSCH | |
| | HHHHH | |
| E200 + α4β7 | GHNYTTRNILPGLNITSDIQMTQSPSSVSASVGDRVTITCRASQGI | 125 |
| binder (nfP2X₇ | SSWLAWYQQKPGKAPKLLIYGASNLESGVPSRFSGSGSGTDFTL | |
| epitope | TISSLQPEDFANYYCQQANSFPWTFGQGTKVEIKRTVAAPSVFIF | |
| underlined), α4β7, | PPSDEQLKSGTASVVCLLNNFYPREAKVQWKVDNALQSGNSQE | |
| Abrilumab, B057- | SVTEQDSKDSTYSLSSTLTLSKADYEKHKVYACEVTHQGLSSPVT | |
| 1 LC | KSFNRGECHHHHHH | |
| α4β7, Abrilumab, | QVQLVQSGAEVKKPGASVKVSCKVSGYTLSDLSIHWVRQAPGKG | 126 |
| B057-2_HC | LEWMGGFDPQDGETIYAQKFQGRVTMTEDTSTDTAYMELSSLKS | |
| | EDTAVYYCATGSSSSWFDPWGQGTLVTVSSASTKGPSVFPLAPS | |
| | SKSTSGGTAALGCLVKDYFPEPVTVSWNSGALTSGVHTFPAVLQ | |
| | SSGLYSLSSVVTVPSSSLGTQTYICNVNHKPSNTKVDKKVEPKSC | |
| | HHHHHH | |

Constructs for binding CSPG4

| | | |
|---|---|---|
| E200 + CSPG4 | GHNYTTRNILPGLNITSRSTQSALTQPASVSGSPGQSITISCTGTS | 127 |
| binder (nfP2X₇ | SDVGGYNYVSWYQQHPGKAPKLMIYDVSNRPSGVSKRFSGSKS | |
| epitope | GNTASLTISGLQAEDEADYYCSSYTSSSTRHVFGTGTQLTVLGRT | |
| underlined), | VAAPSVFIFPPSDEQLKSGTASVVCLLNNFYPREAKVQWKVDNAL | |
| CSPG4, D2A- | QSGNSQESVTEQDSKDSTYSLSSTLTLSKADYEKHKVYACEVTH | |
| 1h10-UC12, | QGLSSPVTKSFNRGECHHHHHH | |
| B058-1_LC | | |
| CSPG4, D2A- | EVQLVESGAEVKKPGDSLKISCKGSGYSFTSYWIGWVRQMPGK | 128 |
| 1h10-UC12, | GLEWMGIIYPGDSVTTYSPAFQGDVTISVDKSISTAYLQWNSLKA | |
| B058-2_HC | SDTGIYYCARRRGNYYMDVWGNGTLVTVSSASTKGPSVFPLAPS | |
| | SKSTSGGTAALGCLVKDYFPEPVTVSWNSGALTSGVHTFPAVLQ | |
| | SSGLYSLSSVVTVPSSSLGTQTYICNVNHKPSNTKVDKKVEPKSC | |
| | HHHHHH | |

Constructs for binding CD80

| | | |
|---|---|---|
| E200 + CD80 | GHNYTTRNILPGLNITSESALTQPPSVSGAPGQKVTISCTGSTSNI | 129 |
| binder (nfP2X₇ | GGYDLHWYQQLPGTAPKLLIYDINKRPSGISDRFSGSKSGTAASL | |
| epitope | AITGLQTEDEADYYCQSYDSSLNAQVFGGGTRLTVLRTVAAPSVF | |
| underlined), | IFPPSDEQLKSGTASVVCLLNNFYPREAKVQWKVDNALQSGNSQ | |
| Galiximab, B059- | ESVTEQDSKDSTYSLSSTLTLSKADYEKHKVYACEVTHQGLSSPV | |
| 1_LC | TKSFNRGECHHHHHH | |
| CD80, Galiximab, | QVQLQESGPGLVKPSETLSLTCAVSGGSISGGYGWGWIRQPPG | 130 |
| B059-2_HC | KGLEWIGSFYSSSGNTYYNPSLKSQVTISTDTSKNQFSLKLNSMT | |
| | AADTAVYYCVRDRLFSVVGMVYNNWFDVWGPGVLVTVSSASTK | |
| | GPSVFPLAPSSKSTSGGTAALGCLVKDYFPEPVTVSWNSGALTS | |
| | GVHTFPAVLQSSGLYSLSSVVTVPSSSLGTQTYICNVNHKPSNTK | |
| | VDKKVEPKSCHHHHHH | |

Constructs for binding CCR4

| | | |
|---|---|---|
| E200 + CCR4 | GHNYTTRNILPGLNITSDVLMTQSPLSLPVTPGEPASISCRSSRNI | 131 |
| binder (nfP2X₇ | VHINGDTYLEWYLQKPGQSPQLLIYKVSNRFSGVPDRFSGSGSG | |
| epitope | TDFTLKISRVEAEDVGVYYCFQGSLLPWTFGQGTKVEIKRTVAAP | |
| underlined), | SVFIFPPSDEQLKSGTASVVCLLNNFYPREAKVQWKVDNALQSG | |
| Mogamulizumab, | NSQESVTEQDSKDSTYSLSSTLTLSKADYEKHKVYACEVTHQGL | |
| B060-1 LC | SSPVTKSFNRGECHHHHHH | |
| CCR4, | EVQLVESGGDLVQPGRSLRLSCAASGFIFSNYGMSWVRQAPGK | 132 |
| Mogamulizumab, | GLEWVATISSASTYSYYPDSVKGRFTISRDNAKNSLYLQMNSLRV | |
| B060-2_HC | EDTALYYCGRHSDGNFAFGYWGQGTLVTVSSASTKGPSVFPLAP | |
| | SSKSTSGGTAALGCLVKDYFPEPVTVSWNSGALTSGVHTFPAVL | |
| | QSSGLYSLSSVVTVPSSSLGTQTYICNVNHKPSNTKVDKKVEPKS | |
| | CHHHHHH | |

Constructs for binding CD115

| | | |
|---|---|---|
| E200 + CD115 | GHNYTTRNILPGLNITSDIQMTQSPSSLSASVGDRVTITCRASEDV | 133 |
| binder (nfP2X₇ | NTYVSWYQQKPGKAPKLLIYAASNRYTGVPSRFSGSGSGTDFTL | |
| epitope | TISSLQPEDFATYYCQQSFSYPTFGQGTKLEIKRTVAAPSVFIFPP | |
| underlined), | SDEQLKSGTASVVCLLNNFYPREAKVQWKVDNALQSGNSQESV | |
| CD115-CSF-1R, | TEQDSKDSTYSLSSTLTLSKADYEKHKVYACEVTHQGLSSPVTKS | |
| Emactuzumab, | FNRGECHHHHHH | |
| B061-1_LC | | |
| CD115-CSF-1R, | QVQLVQSGAEVKKPGASVKVSCKASGYTFTSYDISWVRQAPGQ | 134 |
| Emactuzumab, | GLEWMGVIWTDGGTNYAQKLQGRVTMTTDTSTSTAYMELRSLR | |
| B061-2_HC | SDDTAVYYCARDQRLYFDVWGQGTTVTVSSASTKGPSVFPLAPS | |
| | SKSTSGGTAALGCLVKDYFPEPVTVSWNSGALTSGVHTFPAVLQ | |
| | SSGLYSLSSVVTVPSSSLGTQTYICNVNHKPSNTKVDKKVEPKSC | |
| | HHHHHH | |

Constructs for binding ENOX-2

| | | |
|---|---|---|
| E200 + ENOX-2 | GHNYTTRNILPGLNITSENVLTQSPAIMSASPGERVTMTCSASSSI | 135 |
| binder (nfP2X₇ | RYIYWYQQKPGSSPRLLIYDTSNVAPGVPFRFSGSGSGTSYSLTI | |
| epitope | NRMEAEDAATYYCQEWSGYPYTFGGGTKLELKRTVAAPSVFIFP | |
| underlined), | PSDEQLKSGTASVVCLLNNFYPREAKVQWKVDNALQSGNSQES | |
| ENOX-2, | VTEQDSKDSTYSLSSTLTLSKADYEKHKVYACEVTHQGLSSPVTK | |
| US9459256, | SFNRGECHHHHHH | |
| B062-1_LC | | |
| ENOX-2, | EVKLQESGTEVVKPGASVKLSCKASGYIFTSYDIDWVRQTPEQGL | 136 |
| US9459256, | EWIGWIFPGEGSTEYNEKFKGRATLSVDKSSSTAYMELTRLTSED | |
| B062-2_HC | SAVYFCARGDYYRRYFDLWGQGTTVTVSSASTKGPSVFPLAPSS | |
| | KSTSGGTAALGCLVKDYFPEPVTVSWNSGALTSGVHTFPAVLQS | |
| | SGLYSLSSVVTVPSSSLGTQTYICNVNHKPSNTKVDKKVEPKSCH | |
| | HHHHH | |

Constructs for binding CD56

| | | |
|---|---|---|
| E200 + CD56 | GHNYTTRNILPGLNITSDVVMTQSPLSLPVTLGQPASISCRSSQIII | 137 |
| binder (nfP2X₇ | HSDGNTYLEWFQQRPGQSPRRLIYKVSNRFSGVPDRFSGSGSG | |
| epitope | TDFTLKISRVEAEDVGVYYCFQGSHVPHTFGQGTKVEIKRTVAAP | |
| underlined), | SVFIFPPSDEQLKSGTASVVCLLNNFYPREAKVQWKVDNALQSG | |
| CD56, | NSQESVTEQDSKDSTYSLSSTLTLSKADYEKHKVYACEVTHQGL | |
| Lorvotuzumab, | SSPVTKSFNRGECHHHHHH | |
| B063-1_LC | | |
| CD56, | QVQLVESGGGVVQPGRSLRLSCAASGFTFSSFGMHWVRQAPGK | 138 |
| Lorvotuzumab, | GLEWVAYISSGSFTIYYADSVKGRFTISRDNSKNTLYLQMNSLRA | |
| B063-2_HC | EDTAVYYCARMRKGYAMDYWGQGTLVTVSSASTKGPSVFPLAP | |
| | SSKSTSGGTAALGCLVKDYFPEPVTVSWNSGALTSGVHTFPAVL | |
| | QSSGLYSLSSVVTVPSSSLGTQTYICNVNHKPSNTKVDKKVEPKS | |
| | CHHHHHH | |

Constructs for binding huVH1-69

| | | |
|---|---|---|
| E200 + huVH1-69 | GHNYTTRNILPGLNITSDIQLTQSPSSLSASVGDRVTITCRASQGIS | 139 |
| binder (nfP2X₇ | SNIVWLQQKPGKAPKGLIYHGTNLESGVPSRFSGSGSGTDYTLTI | |
| epitope | SSLEPEDFATYYCVQYSQFPPTFGQGTKLEIKRTVAAPSVFIFPPS | |
| underlined), | DEQLKSGTASVVCLLNNFYPREAKVQWKVDNALQSGNSQESVT | |
| huVH1-69, B075- | EQDSKDSTYSLSSTLTLSKADYEKHKVYACEVTHQGLSSPVTKSF | |
| 1_LC | NRGECHHHHHH | |
| huVH1-69, B075- | QVQLVQSGAEVVKPGASVKVSCKASGYTFTSYWMHWVKQAPG | 140 |
| 2_HC | QGLEWIGAVSPGNSDTSYNEKFKGKATLTVDTSASTAYMELSSL | |
| | RSEDTAVYYCTRSRYGNNALDYWGQGTLVTVSASTKGPSVFPLA | |
| | PSSKSTSGGTAALGCLVKDYFPEPVTVSWNSGALTSGVHTFPAV | |
| | LQSSGLYSLSSVVTVPSSSLGTQTYICNVNHKPSNTKVDKKVEPK | |
| | SCHHHHHH | |

Constructs for binding CD19 (IgG1 format)

| | | |
|---|---|---|
| CD19, | EVQLVESGGGLVKPGGSLKLSCAASGYTFTSYVMHWVRQAPGK | 141 |
| Tafasitamab, | GLEWIGYINPYNDGTKYNEKFQGRVTISSDKSISTAYMELSSLRSE | |
| OR19_1, wt-IgG1, | DTAMYYCARGTYYYGTRVFDYWGQGTLVTVSSASTKGPSVFPLA | |
| HC | PSSKSTSGGTAALGCLVKDYFPEPVTVSWNSGALTSGVHTFPAV | |
| | LQSSGLYSLSSVVTVPSSSLGTQTYICNVNHKPSNTKVDKKVEPK | |
| | SCDKTHTCPPCPAPELLGGPSVFLFPPKPKDTLMISRTPEVTCVV | |
| | VDVSHEDPEVKFNWYVDGVEVHNAKTKPREEQYNSTYRVVSVLT | |
| | VLHQDWLNGKEYKCKVSNKALPAPIEKTISKAKGQPREPQVYTLP | |
| | PSRDELTKNQVSLTCLVKGFYPSDIAVEWESNGQPENNYKTTPP | |
| | VLDSDGSFFLYSKLTVDKSRWQQGNVFSCSVMHEALHNHYTQK | |
| | SLSLSPGKHHHHHH | |
| CD19, | EVQLVESGGGLVKPGGSLKLSCAASGYTFTSYVMHWVRQAPGK | 142 |
| Tafasitamab, | GLEWIGYINPYNDGTKYNEKFQGRVTISSDKSISTAYMELSSLRSE | |
| OR19_2, IgG1- | DTAMYYCARGTYYYGTRVFDYWGQGTLVTVSSASTKGPSVFPLA | |
| SDIE, HC | PSSKSTSGGTAALGCLVKDYFPEPVTVSWNSGALTSGVHTFPAV | |
| | LQSSGLYSLSSVVTVPSSSLGTQTYICNVNHKPSNTKVDKKVEPK | |
| | SCDKTHTCPPCPAPELLGGPDVFLFPPKPKDTLMISRTPEVTCVV | |
| | VDVSHEDPEVKFNWYVDGVEVHNAKTKPREEQYNSTYRVVSVLT | |
| | VLHQDWLNGKEYKCKVSNKALPAPEEKTISKAKGQPREPQVYTL | |
| | PPSRDELTKNQVSLTCLVKGFYPSDIAVEWESNGQPENNYKTTP | |
| | PVLDSDGSFFLYSKLTVDKSRWQQGNVFSCSVMHEALHNHYTQ | |
| | KSLSLSPGKHHHHHH | |

Constructs for binding CD19 (Fab format)

| | | |
|---|---|---|
| CD19, | EVQLVESGGGLVKPGGSLKLSCAASGYTFTSYVMHWVRQAPGK | 143 |
| Tafasitamab, | GLEWIGYINPYNDGTKYNEKFQGRVTISSDKSISTAYMELSSLRSE | |
| B020-2_Heavy | DTAMYYCARGTYYYGTRVFDYWGQGTLVTVSSASTKGPSVFPLA | |
| chain | PSSKSTSGGTAALGCLVKDYFPEPVTVSWNSGALTSGVHTFPAV | |
| | LQSSGLYSLSSVVTVPSSSLGTQTYICNVNHKPSNTKVDKKVEPK | |
| | SCHHHHHH | |
| CD19, | DIVMTQSPATLSLSPGERATLSCRSSKSLQNVNGNTYLYWFQQK | 144 |
| Tafasitamab, | PGQSPQLLIYRMSNLNSGVPDRFSGSGSGTEFTLTISSLEPEDFA | |
| OR19_7 | VYYCMQHLEYPITFGAGTKLEIKRTVAAPSVFIFPPSDEQLKSGTA | |
| Light chain | SVVCLLNNFYPREAKVQWKVDNALQSGNSQESVTEQDSKDSTY | |
| | SLSSTLTLSKADYEKHKVYACEVTHQGLSSPVTKSFNRGEC | |
| E200 + CD19 | GHNYTTRNILPGLNITSDIVMTQSPATLSLSPGERATLSCRSSKSL | 145 |
| binder (nfP2X₇ | QNVNGNTYLYWFQQKPGQSPQLLIYRMSNLNSGVPDRFSGSGS | |
| epitope | GTEFTLTISSLEPEDFAVYYCMQHLEYPITFGAGTKLEIKRTVAAPS | |
| underlined), | VFIFPPSDEQLKSGTASVVCLLNNFYPREAKVQWKVDNALQSGN | |
| CD19, | SQESVTEQDSKDSTYSLSSTLTLSKADYEKHKVYACEVTHQGLSS | |
| Tafasitamab, | PVTKSFNRGEC | |
| Light chain | | |
| OR19_8 | | |
| E200 + CD19 | GHNYTTRNILPGLNITSGGGGSDIVMTQSPATLSLSPGERATLSC | 146 |
| binder (nfP2X₇ | RSSKSLQNVNGNTYLYWFQQKPGQSPQLLIYRMSNLNSGVPDRF | |
| epitope | SGSGSGTEFTLTISSLEPEDFAVYYCMQHLEYPITFGAGTKLEIKR | |
| underlined), | TVAAPSVFIFPPSDEQLKSGTASVVCLLNNFYPREAKVQWKVDNA | |
| CD19, | LQSGNSQESVTEQDSKDSTYSLSSTLTLSKADYEKHKVYACEVT | |
| Tafasitamab, | HQGLSSPVTKSFNRGEC | |
| Light chain | | |
| OR19_9 | | |
| E200 + CD19 | GHNYTTRNILPGLNITSGGGGSGGGGSGGGGSDIVMTQSPATLS | 147 |
| binder (nfP2X₇ | LSPGERATLSCRSSKSLQNVNGNTYLYWFQQKPGQSPQLLIYRM | |
| epitope | SNLNSGVPDRFSGSGSGTEFTLTISSLEPEDFAVYYCMQHLEYPI | |
| underlined), | TFGAGTKLEIKRTVAAPSVFIFPPSDEQLKSGTASVVCLLNNFYPR | |
| CD19, | EAKVQWKVDNALQSGNSQESVTEQDSKDSTYSLSSTLTLSKADY | |
| Tafasitamab, | EKHKVYACEVTHQGLSSPVTKSFNRGEC | |
| Light chain | | |
| OR19_10 | | |
| E200 + CD19 | GHNYTTRNILPGLNITSTFHKTSGSGKDIVMTQSPATLSLSPGERA | 148 |
| binder (nfP2X₇ | TLSCRSSKSLQNVNGNTYLYWFQQKPGQSPQLLIYRMSNLNSGV | |
| epitope | PDRFSGSGSGTEFTLTISSLEPEDFAVYYCMQHLEYPITFGAGTKL | |
| underlined), | EIKRTVAAPSVFIFPPSDEQLKSGTASVVCLLNNFYPREAKVQWK | |
| CD19, | VDNALQSGNSQESVTEQDSKDSTYSLSSTLTLSKADYEKHKVYA | |
| Tafasitamab, | CEVTHQGLSSPVTKSFNRGEC | |
| Light chain | | |
| OR19_11 | | |
| E200 + CD19 | GHNYTTRNILPGLNITSTFHKTDIVMTQSPATLSLSPGERATLSCR | 149 |
| binder (nfP2X₇ | SSKSLQNVNGNTYLYWFQQKPGQSPQLLIYRMSNLNSGVPDRFS | |
| epitope | GSGSGTEFTLTISSLEPEDFAVYYCMQHLEYPITFGAGTKLEIKRT | |
| underlined), | VAAPSVFIFPPSDEQLKSGTASVVCLLNNFYPREAKVQWKVDNAL | |
| CD19, | QSGNSQESVTEQDSKDSTYSLSSTLTLSKADYEKHKVYACEVTH | |
| tafasitamab, Light | QGLSSPVTKSFNRGEC | |
| chain | | |
| OR19 12 | | |
| E200 + CD19 | GHNYTTRNILPGLNITSTFHKTGSDIVMTQSPATLSLSPGERATLS | 150 |
| binder (nfP2X₇ | CRSSKSLQNVNGNTYLYWFQQKPGQSPQLLIYRMSNLNSGVPD | |
| epitope | RFSGSGSGTEFTLTISSLEPEDFAVYYCMQHLEYPITFGAGTKLEI | |
| underlined), | KRTVAAPSVFIFPPSDEQLKSGTASVVCLLNNFYPREAKVQWKVD | |
| CD19, | NALQSGNSQESVTEQDSKDSTYSLSSTLTLSKADYEKHKVYACE | |
| Tafasitamab, | VTHQGLSSPVTKSFNRGEC | |
| Light chain | | |
| OR19_13 | | |
| E200 + CD19 | GHNYTTRNILPGLNITSTFHGSDIVMTQSPATLSLSPGERATLSCR | 151 |
| binder (nfP2X₇ | SSKSLQNVNGNTYLYWFQQKPGQSPQLLIYRMSNLNSGVPDRFS | |
| epitope | GSGSGTEFTLTISSLEPEDFAVYYCMQHLEYPITFGAGTKLEIKRT | |
| underlined), | VAAPSVFIFPPSDEQLKSGTASVVCLLNNFYPREAKVQWKVDNAL | |
| CD19, | QSGNSQESVTEQDSKDSTYSLSSTLTLSKADYEKHKVYACEVTH | |
| Tafasitamab, | QGLSSPVTKSFNRGEC | |
| Light chain | | |
| OR19_14 | | |
| E200 + CD19 | GHNYTTRNILPGLNITSGSDIVMTQSPATLSLSPGERATLSCRSSK | 152 |
| binder (nfP2X₇ | SLQNVNGNTYLYWFQQKPGQSPQLLIYRMSNLNSGVPDRFSGS | |
| epitope | GSGTEFTLTISSLEPEDFAVYYCMQHLEYPITFGAGTKLEIKRTVA | |
| underlined), | APSVFIFPPSDEQLKSGTASVVCLLNNFYPREAKVQWKVDNALQS | |
| CD19, | GNSQESVTEQDSKDSTYSLSSTLTLSKADYEKHKVYACEVTHQG | |
| Tafasitamab, | LSSPVTKSFNRGEC | |
| Light chain | | |
| OR19_15 | | |
| E200 + CD19 | DFPGHNYTTRNILPGLNITSGSDIVMTQSPATLSLSPGERATLSCR | 153 |
| binder (nfP2X₇ | SSKSLQNVNGNTYLYWFQQKPGQSPQLLIYRMSNLNSGVPDRFS | |
| epitope | GSGSGTEFTLTISSLEPEDFAVYYCMQHLEYPITFGAGTKLEIKRT | |
| underlined), | VAAPSVFIFPPSDEQLKSGTASVVCLLNNFYPREAKVQWKVDNAL | |
| CD19, | QSGNSQESVTEQDSKDSTYSLSSTLTLSKADYEKHKVYACEVTH | |
| Tafasitamab, | QGLSSPVTKSFNRGEC | |
| Light chain | | |
| OR19_NEW_001 | | |
| E200 + CD19 | DFPGHNYTTRNILPGLNITSGGGGSDIVMTQSPATLSLSPGERATL | 154 |
| binder (nfP2X₇ | SCRSSKSLQNVNGNTYLYWFQQKPGQSPQLLIYRMSNLNSGVP | |
| epitope | DRFSGSGSGTEFTLTISSLEPEDFAVYYCMQHLEYPITFGAGTKLE | |
| underlined), | IKRTVAAPSVFIFPPSDEQLKSGTASVVCLLNNFYPREAKVQWKV | |
| CD19, | DNALQSGNSQESVTEQDSKDSTYSLSSTLTLSKADYEKHKVYAC | |
| Tafasitamab, | EVTHQGLSSPVTKSFNRGEC | |
| Light chain | | |
| OR19_NEW_002 | | |
| E200 + CD19 | DFPGHNYTTRNILPGLNITSGGGGSGGGGSDIVMTQSPATLSLSP | 155 |
| binder (nfP2X₇ | GERATLSCRSSKSLQNVNGNTYLYWFQQKPGQSPQLLIYRMSNL | |
| epitope | NSGVPDRFSGSGSGTEFTLTISSLEPEDFAVYYCMQHLEYPITFG | |
| underlined), | AGTKLEIKRTVAAPSVFIFPPSDEQLKSGTASVVCLLNNFYPREAK | |
| CD19, | VQWKVDNALQSGNSQESVTEQDSKDSTYSLSSTLTLSKADYEKH | |
| Tafasitamab, | KVYACEVTHQGLSSPVTKSFNRGEC | |
| Light chain | | |
| OR19_NEW_003 | | |
| E200 + CD19 | DFPGHNYTTRNILPGLNITSGGGGSGGGGSGGGGSDIVMTQSPA | 156 |
| binder (nfP2X₇ | TLSLSPGERATLSCRSSKSLQNVNGNTYLYWFQQKPGQSPQLLI | |
| epitope | YRMSNLNSGVPDRFSGSGSGTEFTLTISSLEPEDFAVYYCMQHL | |
| underlined), | EYPITFGAGTKLEIKRTVAAPSVFIFPPSDEQLKSGTASVVCLLNNF | |
| CD19, | YPREAKVQWKVDNALQSGNSQESVTEQDSKDSTYSLSSTLTLSK | |
| Tafasitamab, | ADYEKHKVYACEVTHQGLSSPVTKSFNRGEC | |
| Light chain | | |
| OR19_NEW_004 | | |
| E200 + CD19 | DFPGHNYTTRNILPGLNITSTFHKTSGSGKDIVMTQSPATLSLSPG | 157 |
| binder (nfP2X₇ | ERATLSCRSSKSLQNVNGNTYLYWFQQKPGQSPQLLIYRMSNLN | |
| epitope | SGVPDRFSGSGSGTEFTLTISSLEPEDFAVYYCMQHLEYPITFGA | |
| underlined), | GTKLEIKRTVAAPSVFIFPPSDEQLKSGTASVVCLLNNFYPREAKV | |
| CD19, | QWKVDNALQSGNSQESVTEQDSKDSTYSLSSTLTLSKADYEKHK | |
| Tafasitamab, | VYACEVTHQGLSSPVTKSFNRGEC | |
| Light chain | | |
| OR19_NEW_005 | | |
| E200 + CD19 | DFPGHNYTTRNILPGLNITSTFHKTSGSGKGSDIVMTQSPATLSLS | 158 |
| binder (nfP2X₇ | PGERATLSCRSSKSLQNVNGNTYLYWFQQKPGQSPQLLIYRMSN | |
| epitope | LNSGVPDRFSGSGSGTEFTLTISSLEPEDFAVYYCMQHLEYPITF | |
| underlined), | GAGTKLEIKRTVAAPSVFIFPPSDEQLKSGTASVVCLLNNFYPREA | |
| CD19, | KVQWKVDNALQSGNSQESVTEQDSKDSTYSLSSTLTLSKADYEK | |
| Tafasitamab, | HKVYACEVTHQGLSSPVTKSFNRGEC | |
| Light | | |
| chainOR19_NEW | | |
| 006 | | |
| E200 + CD19 | DFPGHNYTTRNILPGLNITSTFHKTSGSGKGGGGSDIVMTQSPAT | 159 |
| binder (nfP2X₇ | LSLSPGERATLSCRSSKSLQNVNGNTYLYWFQQKPGQSPQLLIY | |
| epitope | RMSNLNSGVPDRFSGSGSGTEFTLTISSLEPEDFAVYYCMQHLE | |
| underlined), | YPITFGAGTKLEIKRTVAAPSVFIFPPSDEQLKSGTASVVCLLNNFY | |
| CD19, | PREAKVQWKVDNALQSGNSQESVTEQDSKDSTYSLSSTLTLSKA | |
| Tafasitamab, | DYEKHKVYACEVTHQGLSSPVTKSFNRGEC | |
| Light chain | | |
| OR19_NEW_007 | | |
| E200 + CD19 | DFPGHNYTTRNILPGLNITSTFHGGGGSDIVMTQSPATLSLSPGE | 160 |
| binder (nfP2X₇ | RATLSCRSSKSLQNVNGNTYLYWFQQKPGQSPQLLIYRMSNLNS | |
| epitope | GVPDRFSGSGSGTEFTLTISSLEPEDFAVYYCMQHLEYPITFGAG | |
| underlined), | TKLEIKRTVAAPSVFIFPPSDEQLKSGTASVVCLLNNFYPREAKVQ | |
| CD19, | WKVDNALQSGNSQESVTEQDSKDSTYSLSSTLTLSKADYEKHKV | |
| Tafasitamab, | YACEVTHQGLSSPVTKSFNRGEC | |
| Light chain | | |
| OR19_NEW_008 | | |
| E200 + CD19 | GHNYTTRNILPGLNITSTFHGGGGSDIVMTQSPATLSLSPGERATL | 161 |
| binder (nfP2X₇ | SCRSSKSLQNVNGNTYLYWFQQKPGQSPQLLIYRMSNLNSGVP | |
| epitope | DRFSGSGSGTEFTLTISSLEPEDFAVYYCMQHLEYPITFGAGTKLE | |
| underlined), | IKRTVAAPSVFIFPPSDEQLKSGTASVVCLLNNFYPREAKVQWKV | |
| CD19, | DNALQSGNSQESVTEQDSKDSTYSLSSTLTLSKADYEKHKVYAC | |
| Tafasitamab, | EVTHQGLSSPVTKSFNRGEC | |
| Light chain | | |
| OR19_NEW_009 | | |
| E200 + CD19 | DFPGHNYTTRNILPGLNITSTFHKTGGGGSDIVMTQSPATLSLSPG | 162 |
| binder (nfP2X₇ | ERATLSCRSSKSLQNVNGNTYLYWFQQKPGQSPQLLIYRMSNLN | |
| epitope | SGVPDRFSGSGSGTEFTLTISSLEPEDFAVYYCMQHLEYPITFGA | |
| underlined), | GTKLEIKRTVAAPSVFIFPPSDEQLKSGTASVVCLLNNFYPREAKV | |
| CD19, | QWKVDNALQSGNSQESVTEQDSKDSTYSLSSTLTLSKADYEKHK | |
| Tafasitamab, | VYACEVTHQGLSSPVTKSFNRGEC | |
| Light chain | | |
| OR19_NEW_010 | | |
| E200 + CD19 | GHNYTTRNILPGLNITSTFHKTGGGGSDIVMTQSPATLSLSPGER | 163 |
| binder (nfP2X₇ | ATLSCRSSKSLQNVNGNTYLYWFQQKPGQSPQLLIYRMSNLNSG | |
| epitope | VPDRFSGSGSGTEFTLTISSLEPEDFAVYYCMQHLEYPITFGAGT | |
| underlined), | KLEIKRTVAAPSVFIFPPSDEQLKSGTASVVCLLNNFYPREAKVQ | |
| CD19, | WKVDNALQSGNSQESVTEQDSKDSTYSLSSTLTLSKADYEKHKV | |
| Tafasitamab, | YACEVTHQGLSSPVTKSFNRGEC | |
| Light chain | | |
| OR19_NEW_011 | | |
| E200 + CD19 | GHNYTTRNILPGLNITSGGGGSGGGGSDIVMTQSPATLSLSPGER | 164 |
| binder (nfP2X₇ | ATLSCRSSKSLQNVNGNTYLYWFQQKPGQSPQLLIYRMSNLNSG | |
| epitope | VPDRFSGSGSGTEFTLTISSLEPEDFAVYYCMQHLEYPITFGAGT | |
| underlined), | KLEIKRTVAAPSVFIFPPSDEQLKSGTASVVCLLNNFYPREAKVQ | |
| CD19, | WKVDNALQSGNSQESVTEQDSKDSTYSLSSTLTLSKADYEKHKV | |
| Tafasitamab, | YACEVTHQGLSSPVTKSFNRGEC | |
| Light chain | | |
| OR19_NEW_012 | | |

Exemplary CAR constructs

| | | |
|---|---|---|
| CAR7 (anti- | MALPVTALLLPLALLLHAARPEVQLLESGGGLVQPGGSLRLSCAA | 165 |
| nfP2X7) | SGFTFRNHDMGWVRQAPGKGLEWVSAISGSGGSTYYANSVKGR | |
| | FTISRDNSKNTLYLQMNSLRAEDTAVYYCAEPKPMDTEFDYRSP | |
| | GTLVTVSSRAAAIEVMYPPPYLDNEKSNGTIIHVKGKHLCPSPLFP | |
| | GPSKPFWVLVVVGGVLACYSLLVTVAFIIFWVRSKRSRLLHSDYM | |
| | NMTPRRPGPTRKHYQPYAPPRDFAAYRSKRGRKKLLYIFKQPFM | |
| | RPVQTTQEEDGCSCRFPEEEEGGCELRVKFSRSADAPAYKQGQ | |
| | NQLYNELNLGRREEYDVLDKRRGRDPEMGGKPRRKNPQEGLYN | |
| | ELQKDKMAEAYSEIGMKGERRRGKGHDGLYQGLSTATKDTYDAL | |
| | HMQALPPRLEGGGEGRGSLLTCGDVEENPGPRMLLLVTSLLLCE | |
| | LPHPAFLLIPRKVCNGIGIGEFKDSLSINATNIKHFKNCTSISGDLHI | |
| | LPVAFRGDSFTHTPPLDPQELDILKTVKEITGFLLIQAWPENRTDL | |
| | HAFENLEIIRGRTKQHGQFSLAVVSLNITSLGLRSLKEISDGDVIISG | |
| | NKNLCYANTINWKKLFGTSGQKTKIISNRGENSCKATGQVCHALC | |
| | SPEGCWGPEPRDCVSCRNVSRGRECVDKCNLLEGEPREFVENS | |
| | ECIQCHPECLPQAMNITCTGRGPDNCIQCAHYIDGPHCVKTCPAG | |
| | VMGENNTLVWKYADAGHVCHLCHPNCTYGCTGPGLEGCPTNGP | |
| | KIPSIATGMVGALLLLLVVALGIGLFM | |
| CAR10 | MALPVTALLLPLALLLHAARPEVQLLESGGGLVQPGGSLRLSCAA | 166 |
| (anti-nfP2X7) | SGFTFRNHDMGWVRQAPGKGLEWVSAISGSGGSTYYANSVKGR | |
| | FTISRDNSKNTLYLQMNSLRAEDTAVYYCAEPKPMDTEFDYRSP | |
| | GTLVTVSSTTTPAPRPPTPAPTIASQPLSLRPEACRPAAGGAVHT | |
| | RGLDFACDFWVLVVVGGVLACYSLLVTVAFIIFWVRSKRSRLLHS | |
| | DYMNMTPRRPGPTRKHYQPYAPPRDFAAYRSKRGRKKLLYIFKQ | |
| | PFMRPVQTTQEEDGCSCRFPEEEEGGCELRVKFSRSADAPAYK | |
| | QGQNQLYNELNLGRREEYDVLDKRRGRDPEMGGKPRRKNPQE | |
| | GLYNELQKDKMAEAYSEIGMKGERRRGKGHDGLYQGLSTATKD | |
| | TYDALHMQALPPRLEGGGEGRGSLLTCGDVEENPGPRMLLLVTS | |
| | LLLCELPHPAFLLIPRKVCNGIGIGEFKDSLSINATNIKHFKNCTSIS | |
| | GDLHILPVAFRGDSFTHTPPLDPQELDILKTVKEITGFLLIQAWPEN | |
| | RTDLHAFENLEIIRGRTKQHGQFSLAVVSLNITSLGLRSLKEISDGD | |
| | VIISGNKNLCYANTINWKKLFGTSGQKTKIISNRGENSCKATGQVC | |
| | HALCSPEGCWGPEPRDCVSCRNVSRGRECVDKCNLLEGEPREF | |
| | VENSECIQCHPECLPQAMNITCTGRGPDNCIQCAHYIDGPHCVKT | |
| | CPAGVMGENNTLVWKYADAGHVCHLCHPNCTYGCTGPGLEGC | |
| | PTNGPKIPSIATGMVGALLLLLVVALGIGLFM | |
| CAR16 | MALPVTALLLPLALLLHAARPEVQLLESGGGLVQPGGSLRLSCAA | 167 |
| (anti-nfP2X7) | SGFTFRNHDMGWVRQAPGKGLEWVSAISGSGGSTYYANSVKGR | |
| | FTISRDNSKNTLYLQMNSLRAEDTAVYYCAEPKPMDTEFDYRSP | |
| | GTLVTVSSESKYGPPCPPCPFWVLVVVGGVLACYSLLVTVAFIIF | |
| | WVRSKRSRLLHSDYMNMTPRRPGPTRKHYQPYAPPRDFAAYRS | |
| | KRGRKKLLYIFKQPFMRPVQTTQEEDGCSCRFPEEEEGGCELRV | |
| | KFSRSADAPAYKQGQNQLYNELNLGRREEYDVLDKRRGRDPEM | |
| | GGKPRRKNPQEGLYNELQKDKMAEAYSEIGMKGERRRGKGHDG | |
| | LYQGLSTATKDTYDALHMQALPPRLEGGGEGRGSLLTCGDVEEN | |
| | PGPRMLLLVTSLLLCELPHPAFLLIPRKVCNGIGIGEFKDSLSINAT | |
| | NIKHFKNCTSISGDLHILPVAFRGDSFTHTPPLDPQELDILKTVKEIT | |
| | GFLLIQAWPENRTDLHAFENLEIIRGRTKQHGQFSLAVVSLNITSL | |
| | GLRSLKEISDGDVIISGNKNLCYANTINWKKLFGTSGQKTKIISNRG | |
| | ENSCKATGQVCHALCSPEGCWGPEPRDCVSCRNVSRGRECVD | |
| | KCNLLEGEPREFVENSECIQCHPECLPQAMNITCTGRGPDNCIQC | |
| | AHYIDGPHCVKTCPAGVMGENNTLVWKYADAGHVCHLCHPNCT | |
| | YGCTGPGLEGCPTNGPKIPSIATGMVGALLLLLVVALGIGLFM | |

Constructs for binding to CD117

| | | |
|---|---|---|
| E200 + CD117 | GHNYTTRNILPGLNITSDIQMTQSPSSLSASVGDRVTITCRASQSI | 169 |
| binder (nfP2X₇ | NSYLNWYQQKPGKAPKLLIYAASSLQSGVPSRFSGSGSGTDFTL | |
| epitope | TISSLQPEDFATYYCQQGVSDITFGGGTKVEIKRTVAAPSVFIFPP | |
| underlined), | SDEQLKSGTASVVCLLNNFYPREAKVQWKVDNALQSGNSQESV | |
| WO2019084067, | TEQDSKDSTYSLSSTLTLSKADYEKHKVYACEVTHQGLSSPVTKS | |
| mAb-55, B076- | FNRGECHHHHHH | |
| 1_LC | | |
| CD117, | QVQLVQSGAEVKKPGSSVKVSCKASGGTFRIYAISWVRQAPGQG | 170 |
| WO2019084067, | LEWMGGIIPDFGVANYAQKFQGRVTITADESTSTAYMELSSLRSE | |
| mAb-55, B076- | DTAVYYCARGGLDTDEFDLWGRGTLVTVSSASTKGPSVFPLAPS | |
| 2_HC | SKSTSGGTAALGCLVKDYFPEPVTVSWNSGALTSGVHTFPAVLQ | |
| | SSGLYSLSSVVTVPSSSLGTQTYICNVNHKPSNTKVDKKVEPKSC | |
| | HHHHHH | |

Constructs for binding to CD133

| | | |
|---|---|---|
| E200 + CD133 | GHNYTTRNILPGLNITSDIQMTQSPSSLSASVGDRVTITCRASQGS | 171 |
| binder (nfP2X₇ | SYVAWYQQKPGKAPKLLIYSASYLYSGVPSRFSGSRSGTDFTLTI | |
| epitope | SSLQPEDFATYYCQQGVWSLITFGQGTKVEIKRTVAAPSVFIFPPS | |
| underlined), | DEQLKSGTASVVCLLNNFYPREAKVQWKVDNALQSGNSQESVT | |
| CA2962157, | EQDSKDSTYSLSSTLTLSKADYEKHKVYACEVTHQGLSSPVTKSF | |
| RW03, B077- | NRGECHHHHHH | |
| 1_LC | | |
| CD133, | EVQLVESGGGLVQPGGSLRLSCAASGFNLSSSSIHWVRQAPGK | 172 |
| CA2962157, | GLEWVAYIYPYYSYTYYADSVKGRFTISADTSKNTAYLQMNSLRA | |
| RW03, B077- | EDTAVYYCAREGSVAGEDYWGQGTLVTVSSASTKGPSVFPLAPS | |
| 2_HC | SKSTSGGTAALGCLVKDYFPEPVTVSWNSGALTSGVHTFPAVLQ | |
| | SSGLYSLSSVVTVPSSSLGTQTYICNVNHKPSNTKVDKKVEPKSC | |
| | HHHHHH | |

Constructs for binding to MUC1

| | | |
|---|---|---|
| E200 + MUC1 | GHNYTTRNILPGLNITSDIVMTQSPDSLAVSLGERATINCKSSQSL | 173 |
| binder (nfP2X₇ | LNSGDQKNYLTWYQQKPGQPPKLLIYWASTRESGVPDRFSGSG | |
| epitope | SGTDFTLTISSLQAEDVAVYYCQNDYSYPLTFGQGTKVEIKRTVA | |
| underlined), | APSVFIFPPSDEQLKSGTASVVCLLNNFYPREAKVQWKVDNALQS | |
| WO2016130726A | GNSQESVTEQDSKDSTYSLSSTLTLSKADYEKHKVYACEVTHQG | |
| 1, B078-1_LC | LSSPVTKSFNRGECHHHHHH | |
| MUC1, | QVQLVQSGAEVKKTGSSVKVSCKASGYTFTDHAIHWVRQAPGQ | 174 |
| WO2016130726A | ALEWMGHFSPGNTDIKYNDKFKGRVTLTVDRSMSTAYMELSSLR | |
| 1, B078-2_HC | SEDTAMYYCKTSTFFFDYWGQGTMVTVSSASTKGPSVFPLAPSS | |
| | KSTSGGTAALGCLVKDYFPEPVTVSWNSGALTSGVHTFPAVLQS | |
| | SGLYSLSSVVTVPSSSLGTQTYICNVNHKPSNTKVDKKVEPKSCH | |
| | HHHHH | |

Constructs for binding to Mesothelin (MSLN)

| | | |
|---|---|---|
| E200 + MSLN | GHNYTTRNILPGLNITSDIQMTQSPSSLSASVGDRVTITCRASQSI | 175 |
| binder (nfP2X₇ | SSYLNWYQQKPGKAPKLLIYAASSLQSGVPSGFSGSGSGTDFTL | |
| epitope | TISSLQPEDFATYYCQQSYSTPLTFGGGTKVEIKRTVAAPSVFIFP | |
| underlined), | PSDEQLKSGTASVVCLLNNFYPREAKVQWKVDNALQSGNSQES | |
| WO2009120769, | VTEQDSKDSTYSLSSTLTLSKADYEKHKVYACEVTHQGLSSPVTK | |
| B079-1_LC | SFNRGECHHHHHH | |
| MSLN, | QVQLQESGPGLVKPSETLSLTCTVSGGSVSSGSYYWSWIRQPP | 176 |
| WO2009120769, | GKGLEWIGYIYYSGSTNYNPSLKSRVTISVDTSKNQFSLKLSSVTA | |
| B079-2_HC | ADTAVYYCAREGKNGAFDIWGQGTMVTVSSASTKGPSVFPLAPS | |
| | SKSTSGGTAALGCLVKDYFPEPVTVSWNSGALTSGVHTFPAVLQ | |
| | SSGLYSLSSVVTVPSSSLGTQTYICNVNHKPSNTKVDKKVEPKSC | |
| | HHHHHH | |

Constructs for binding to ROR2

| | | |
|---|---|---|
| E200 + ROR2 | GHNYTTRNILPGLNITSQSALTQPASVSGSPGQSITISCTGTSGDV | 177 |
| binder (nfP2X₇ | GGYNYVSWYQHHPGKAPKLIIYDVNKRPSGFSDRFSGSKSGNTA | |
| epitope | SLTISGLQAEDEADYYCSSYTSTSTVFGGGTKLTVLGKRTVAAPS | |
| underlined), | VFIFPPSDEQLKSGTASVVCLLNNFYPREAKVQWKVDNALQSGN | |
| WO2016142768A | SQESVTEQDSKDSTYSLSSTLTLSKADYEKHKVYACEVTHQGLSS | |
| 1, B080-1_LC | PVTKSFNRGECHHHHHH | |
| ROR2, | QITLKESGPELVKPTQTLTLTCTFSGFSLSTSGMSVSWIRQPPGK | 178 |
| WO2016142768A | ALEWLARIDWDDDKYYSTSLKTRLTISKDTSKNQVVLTMTNTDPV | |
| 1, B080-2_HC | DTATYYCARGFYLAYGSYDSWGQGTLVTVSSASTKGPSVFPLAP | |
| | SSKSTSGGTAALGCLVKDYFPEPVTVSWNSGALTSGVHTFPAVL | |
| | QSSGLYSLSSVVTVPSSSLGTQTYICNVNHKPSNTKVDKKVEPKS | |
| | CHHHHHH | |

Constructs for binding to IL13Ra2

| | | |
|---|---|---|
| E200 + IL13Ra2 | GHNYTTRNILPGLNITSDIQMTQSPSSLSASVGDRVTITCTASLSV | 179 |
| binder (nfP2X₇ | SSTYLHWYQQKPGSSPKLWIYSTSNLASGVPSRFSGSGSGTSFT | |
| epitope | LTISSLQPEDFATYYCHQYHRSPLTFGGGTKVEIKRTVAAPSVFIF | |
| underlined), | PPSDEQLKSGTASVVCLLNNFYPREAKVQWKVDNALQSGNSQE | |
| WO2014072888A | SVTEQDSKDSTYSLSSTLTLSKADYEKHKVYACEVTHQGLSSPVT | |
| 1, B081-1_LC | KSFNRGECHHHHHH | |
| IL13Ra2, | EVQLVESGGGLVQPGGSLRLSCAASGFSLTKYGVHWVRQAPGK | 180 |
| WO2014072888A | GLEWVGVKWAGGSTDYNSALMSRFTISKDNAKNSLYLQMNSLR | |
| 1, B081-2_HC | AEDTAVYYCARDHRDAMDYWGQGTLVTVSSASTKGPSVFPLAP | |
| | SSKSTSGGTAALGCLVKDYFPEPVTVSWNSGALTSGVHTFPAVL | |
| | QSSGLYSLSSVVTVPSSSLGTQTYICNVNHKPSNTKVDKKVEPKS | |
| | CHHHHHH | |

Constructs for binding to IL13Ra2

| | | |
|---|---|---|
| IL13Ra2, ligand, | HHHHHHGPVPPSTALRYLIEELVNITQNQKAPLCNGSMVWSINLT | 181 |
| US20180265844, | AGMYCAALESLINVSGCSAIEKTQRMLSGFCPHKVSAGQFSSLHV | |
| B082 | RDTKIEVAQFVKDLLLHLKKLFREGRFNGGGGSGHNYTTRNILPG | |
| | LNITS | |

Constructs for binding to EPHA2

| | | |
|---|---|---|
| E200 + EPHA2 | GHNYTTRNILPGLNITSDIQLTQSPSSLSASVGDRVTITCKASQDIN | 182 |
| binder (nfP2X₇ | NYLSWYQQKPGQAPRLLIYRANRLVDGVPDRFSGSGYGTDFTLTI | |
| epitope | NNIESEDAAYYFCLKYDVFPYTFGQGTKVEIKRTVAAPSVFIFPPS | |
| underlined), | DEQLKSGTASVVCLLNNFYPREAKVQWKVDNALQSGNSQESVT | |
| WO2007073499, | EQDSKDSTYSLSSTLTLSKADYEKHKVYACEVTHQGLSSPVTKSF | |
| B083-1_LC | NRGECHHHHHH | |
| EPHA2, | QVQLLESGGGLVQPGGSLRLSCAASGFTFSSYTMSWVRQAPGQ | 183 |
| WO2007073499, | ALEWMGTISSGGTYTYYPDSVKGRFTISRDNAKNSLYLQMNSLR | |
| B083-2_HC | AEDTAVYYCAREAIFTYWGRGTLVTSSASTKGPSVFPLAPSSKST | |
| | SGGTAALGCLVKDYFPEPVTVSWNSGALTSGVHTFPAVLQSSGL | |
| | YSLSSVVTVPSSSLGTQTYICNVNHKPSNTKVDKKVEPKSCHHHH | |
| | HH | |

Constructs for binding to EGFRvIII

| | | |
|---|---|---|
| E200 + EGFRvIII | GHNYTTRNILPGLNITSDIQMTQSPSSLSASVGDRVTITCRASQGI | 184 |
| binder (nfP2X₇ | RNNLAWYQQKPGKAPKRLIYAASNLQSGVPSRFTGSGSGTEFTLI | |
| epitope | VSSLQPEDFATYYCLQHHSYPLTSGGGTKVEIKRTVAAPSVFIFPP | |
| underlined), | SDEQLKSGTASVVCLLNNFYPREAKVQWKVDNALQSGNSQESV | |
| WO2013185010, | TEQDSKDSTYSLSSTLTLSKADYEKHKVYACEVTHQGLSSPVTKS | |
| B084-1_LC | FNRGECHHHHHH | |
| EGFRvIII, | EVQVLESGGGLVQPGGSLRLSCAASGFTFSSYAMSWVRQAPGK | 185 |
| WO2013185010, | GLEWVSAISGSGGSTNYADSVKGRFTISRDNSKNTLYLQMNSLR | |
| B084-2_HC | AEDTAVYYCAGSSGWSEYWGQGTLVTVSSASTKGPSVFPLAPS | |
| | SKSTSGGTAALGCLVKDYFPEPVTVSWNSGALTSGVHTFPAVLQ | |
| | SSGLYSLSSVVTVPSSSLGTQTYICNVNHKPSNTKVDKKVEPKSC | |
| | HHHHHH | |

Constructs for binding to PSMA

| | | |
|---|---|---|
| E200 + PSMA | GHNYTTRNILPGLNITSDIVMTQSPSSLSASVGDRVTITCKASQDV | 186 |
| binder (nfP2X₇ | GTAVDWYQQKPGKAPKLLIYWASTRHTGVPDRFTGSGSGTDFTL | |
| epitope | TISSLQPEDFADYFCQQYNSYPLTFGGGTKLEIKRTVAAPSVFIFP | |
| underlined), | PSDEQLKSGTASVVCLLNNFYPREAKVQWKVDNALQSGNSQES | |
| US20190300622, | VTEQDSKDSTYSLSSTLTLSKADYEKHKVYACEVTHQGLSSPVTK | |
| B085-1_LC | SFNRGECHHHHHH | |
| PSMA, | EVQLVQSGAEVKKPGASVKISCKTSGYTFTEYTIHWVKQASGKGL | 187 |
| US20190300622, | EWIGNINPNNGGTTYNQKFEDRATLTVDKSTSTAYMELSSLRSED | |
| B085-2_HC | TAVYYCAAGWNFDYWGQGTTVTVSSASTKGPSVFPLAPSSKSTS | |
| | GGTAALGCLVKDYFPEPVTVSWNSGALTSGVHTFPAVLQSSGLY | |
| | SLSSVVTVPSSSLGTQTYICNVNHKPSNTKVDKKVEPKSCHHHHH | |
| | H | |

Constructs for binding to CEA

| | | |
|---|---|---|
| E200 + CEA binder | GHNYTTRNILPGLNITSDIVLTQSPASLTVSLGLRATISCRASKSVS | 188 |
| (nfP2X₇ epitope | ASGYSYMHWYQQRPGQPPKLLIYLASNLQSGVPARFSGSGSGT | |
| underlined), | DFTLNIHPVEEEDAATYYCQHSRELPTFGGGTKLEIKRTVAAPSVF | |
| WO1999043817, | IFPPSDEQLKSGTASVVCLLNNFYPREAKVQWKVDNALQSGNSQ | |
| B086-1_LC | ESVTEQDSKDSTYSLSSTLTLSKADYEKHKVYACEVTHQGLSSPV | |
| | TKSFNRGECHHHHHH | |
| CEA, | EVQLQQSGAELVRSGASVKMSCTASGFNIKDYYMHWVKQRPEQ | 189 |
| WO1999043817, | GLEWIGWIDPENGDTEYAPKFQGKATMTTDYSSNTAYLQLSSLTS | |
| B086-2_HC | EDTAVYYCNTRGLSTMITTRWFFDVWGAGTTVAVSSASTKGPSV | |
| | FPLAPSSKSTSGGTAALGCLVKDYFPEPVTVSWNSGALTSGVHT | |
| | FPAVLQSSGLYSLSSVVTVPSSSLGTQTYICNVNHKPSNTKVDKK | |
| | VEPKSCHHHHHH | |

Constructs for binding to PSCA

| | | |
|---|---|---|
| E200 + PSCA | GHNYTTRNILPGLNITSDIQLTQSPSSLSASVGDRVTITCSASSSV | 190 |
| binder (nfP2X₇ | RFIHWYQQKPGKAPKRLIYDTSKLASGVPSRFSGSGSGTDFTLTI | |
| epitope | SSLQPEDFATYYCQQWSSSPFTFGQGTKVEIKRTVAAPSVFIFPP | |
| underlined), | SDEQLKSGTASVVCLLNNFYPREAKVQWKVDNALQSGNSQESV | |
| US20120077962, | TEQDSKDSTYSLSSTLTLSKADYEKHKVYACEVTHQGLSSPVTKS | |
| B087-1_LC | FNRGECHHHHHH | |
| PSCA, | EVQLVESGGGLVQPGGSLRLSCAASGFNIKDYYIHWVRQAPGKG | 191 |
| US20120077962, | LEWVAWIDPENGDTEFADSVKGRFTISADTSKNTAYLQMNSLRA | |
| B087-2_HC | EDTAVYYCKTGGFWGQGTLVTVSSASTKGPSVFPLAPSSKSTSG | |
| | GTAALGCLVKDYFPEPVTVSWNSGALTSGVHTFPAVLQSSGLYS | |
| | LSSVVTVPSSSLGTQTYICNVNHKPSNTKVDKKVEPKSCHHHHH | |
| | H | |

Constructs for binding to Lewis Y

| | | |
|---|---|---|
| E200 + Lewis Y | GHNYTTRNILPGLNITSDIQMTQSPSSLSASVGDRVTITCRSSQRI | 192 |
| binder (nfP2X₇ | VHSNGNTYLEWYQQTPGKAPKLLIYKVSNRFSGVPSRFSGSGSG | |
| epitope | TDFTFTISSLQPEDIATYYCFQGSHVPFTFGQGTKLQITKRTVAAP | |
| underlined), | SVFIFPPSDEQLKSGTASVVCLLNNFYPREAKVQWKVDNALQSG | |
| EP0749482, | NSQESVTEQDSKDSTYSLSSTLTLSKADYEKHKVYACEVTHQGL | |
| B088-1_LC | SSPVTKSFNRGECHHHHHH | |
| Lewis Y, | EVQLVESGGGVVQPGRSLRLSCSSSGFTFSDYYMYWVRQAPGK | 193 |
| EP0749482, | GLEWVAYMSNVGAITDYPDTVKGRFTISRDNSKNTLFLQMDSLRP | |
| B088-2_HC | EDTGVYFCARGTRDGSWFAYWGQGTPVTVSSASTKGPSVFPLA | |
| | PSSKSTSGGTAALGCLVKDYFPEPVTVSWNSGALTSGVHTFPAV | |
| | LQSSGLYSLSSVVTVPSSSLGTQTYICNVNHKPSNTKVDKKVEPK | |
| | SCHHHHHH | |

Constructs for binding to CD171 L1CAM

| | | |
|---|---|---|
| E200 + CD171_L1 | GHNYTTRNILPGLNITSDIQMTQSPSSLSASVGDRVTITCRASQDI | 194 |
| CAM binder | SNYLNWYQQKPGKAPKLLIYYTSRLHSGVPSRFSGSGSGTDYTL | |
| (nfP2X₇ epitope | TISSLQPEDFATYFCQQGNTLPWTFGGGTKLEIKRTVAAPSVFIFP | |
| underlined), | PSDEQLKSGTASVVCLLNNFYPREAKVQWKVDNALQSGNSQES | |
| WO2008151819, | VTEQDSKDSTYSLSSTLTLSKADYEKHKVYACEVTHQGLSSPVTK | |
| B089-1_LC | SFNRGECHHHHHH | |
| CD171_L1CAM, | EVQLVQSGGGLVQSGGSLRLSCRASGYTFTRYWMLWVRQRPG | 195 |
| WO2008151819, | HGLEWVGEINPRNDRTNYNEKFKTRFTISVDRSKSTAYLQMDSLR | |
| B089-2_HC | AEDTAVYFCALGGGYAMDYWGQGTLVTVSSASTKGPSVFPLAPS | |
| | SKSTSGGTAALGCLVKDYFPEPVTVSWNSGALTSGVHTFPAVLQ | |
| | SSGLYSLSSVVTVPSSSLGTQTYICNVNHKPSNTKVDKKVEPKSC | |
| | HHHHHH | |

Constructs for binding to EpCAM

| | | |
|---|---|---|
| E200 + EpCAM | GHNYTTRNILPGLNITSEIVMTQSPATLSVSPGERATLSCRASQSV | 196 |
| binder (nfP2X₇ | SSNLAWYQQKPGQAPRLIIYGASTTASGIPARFSASGSGTDFTLTI | |
| epitope | SSLQSEDFAVYYCQQYNNWPPAYTFGQGTKLEIKRTVAAPSVFIF | |
| underlined), | PPSDEQLKSGTASVVCLLNNFYPREAKVQWKVDNALQSGNSQE | |
| WO2010142990A | SVTEQDSKDSTYSLSSTLTLSKADYEKHKVYACEVTHQGLSSPVT | |
| 1, B090-1_LC | KSFNRGECHHHHHH | |
| EpCAM, | QVQLVQSGAEVKKPGSSVKVSCKASGGTFSSYAISWVRQAPGQ | 197 |
| WO2010142990A | GLEWMGGIIPIFGTANYAQKFQGRVTITADESTSTAYMELSSLRSE | |
| 1, B090-2_HC | DTAVYYCARGLLWNYWGQGTLVTVSSASTKGPSVFPLAPSSKST | |
| | SGGTAALGCLVKDYFPEPVTVSWNSGALTSGVHTFPAVLQSSGL | |
| | YSLSSVVTVPSSSLGTQTYICNVNHKPSNTKVDKKVEPKSCHHHH | |
| | HH | |

Constructs for binding to ALK

| | | |
|---|---|---|
| E200 + ALK | GHNYTTRNILPGLNITSEIVLTQSPATLSLSPGERATLSCRASESV | 198 |
| binder (nfP2X₇ | DNYGISFAWYQQKPGQAPRLLIYRASRATGIPARFSGSGSGTDFT | |
| epitope | LTISSLEPEDFAVYYCQQNNKDPPTFFGQGTKLEIKRTVAAPSVFI | |
| underlined), | FPPSDEQLKSGTASVVCLLNNFYPREAKVQWKVDNALQSGNSQ | |
| WO2015069922A | ESVTEQDSKDSTYSLSSTLTLSKADYEKHKVYACEVTHQGLSSPV | |
| 2, B091-1_LC | TKSFNRGECHHHHHH | |
| ALK, | QVQLQQSGAEVKKPGSSVKVSCKASGYAFSSYISWVRQAPGQG | 199 |
| WO2015069922A | LEWMGGQIYPGDGDTNYAQKFQGRVTITADESTSTAYMELSSLR | |
| 2, B091-2_HC | SEDTAVYYCVRYYYGSSGYFDYWWGQGTMVTVSSASTKGPSVF | |
| | PLAPSSKSTSGGTAALGCLVKDYFPEPVTVSWNSGALTSGVHTF | |
| | PAVLQSSGLYSLSSVVTVPSSSLGTQTYICNVNHKPSNTKVDKKV | |
| | EPKSCHHHHHH | |

Constructs for binding to IGF-1R CD221

| | | |
|---|---|---|
| E200 + IGF-1R | GHNYTTRNILPGLNITSDVVMTQTPLSLPVSLGDPASISCRSSQSI | 200 |
| binder (nfP2X₇ | VHSNVNTYLEWYLQKPGQSPRLLIYKVSNRFSGVPDRFSGSGAG | |
| epitope | TDFTLRISRVEAEDLGIYYCFQGSHVPPTFGGGTKLEIKRTVAAPS | |
| underlined), | VFIFPPSDEQLKSGTASVVCLLNNFYPREAKVQWKVDNALQSGN | |
| US7985842B2, | SQESVTEQDSKDSTYSLSSTLTLSKADYEKHKVYACEVTHQGLSS | |
| B092-1_LC | PVTKSFNRGECHHHHHH | |
| IGF-1R, | QVQLVQSGAEVVKPGASVKLSCKASGYTFTSYWMHWVKQRPG | 201 |
| US7985842B2, | QGLEWIGEINPSNGRTNYNQKFQGKATLTVDKSSSTAYMQLSSL | |
| B092-2_HC | TSEDSAVYYFARGRPDYYGSSKWYFDVWGQGTTVTVSSASTKG | |
| | PSVFPLAPSSKSTSGGTAALGCLVKDYFPEPVTVSWNSGALTSG | |
| | VHTFPAVLQSSGLYSLSSVVTVPSSSLGTQTYICNVNHKPSNTKV | |
| | DKKVEPKSCHHHHHH | |

Constructs for binding to Nectin 4

| | | |
|---|---|---|
| E200 + Nectin 4 | GHNYTTRNILPGLNITSSIVMTQTPKFLLVSAGDRVTITCKASQSVS | 202 |
| binder (nfP2X₇ | NDVAWYQQKPGQSPKLLIYYASNRYTGVPDRFTGSGYGTDFTFT | |
| epitope | ISAVQAEDLAVYFCQQDYSSPYTFGGGTKLEIKRTVAAPSVFIFPP | |
| underlined), | SDEQLKSGTASVVCLLNNFYPREAKVQWKVDNALQSGNSQESV | |
| US20210130459, | TEQDSKDSTYSLSSTLTLSKADYEKHKVYACEVTHQGLSSPVTKS | |
| B093-1_LC | FNRGECHHHHHH | |
| Nectin 4, | QVQLQQSGPELVKPGASVRISCKASGYTFTTYYIHWVKQRPGQG | 203 |
| US20210130459, | LEWIGWIYPGNVNTKNNEKFKVKATLTADKSSSTAYMQLSSLTSE | |
| B093-2_HC | DSAVYFCARSNPYVMDYWGQGTSVTVSSASTKGPSVFPLAPSS | |
| | KSTSGGTAALGCLVKDYFPEPVTVSWNSGALTSGVHTFPAVLQS | |
| | SGLYSLSSVVTVPSSSLGTQTYICNVNHKPSNTKVDKKVEPKSCH | |
| | HHHHH | |

Constructs for binding to FAP

| | | |
|---|---|---|
| E200 + FAP | GHNYTTRNILPGLNITSEIVLTQSPGTLSLSPGERATLSCRASQSV | 204 |
| binder (nfP2X₇ | TSSYLAWYQQKPGQAPRLLINVGSRRATGIPDRFSGSGSGTDFT | |
| epitope | LTISRLEPEDFAVYYCQQGIMLPPTFGQGTKVEIKRTVAAPSVFIFP | |
| underlined), | PSDEQLKSGTASVVCLLNNFYPREAKVQWKVDNALQSGNSQES | |
| EP2603530, | VTEQDSKDSTYSLSSTLTLSKADYEKHKVYACEVTHQGLSSPVTK | |
| B094-1_LC | SFNRGECHHHHHH | |
| FAP, EP2603530, | EVQLLESGGGLVQPGGSLRLSCAASGFTFSSYAMSWVRQAPGK | 205 |
| B094-2 HC | GLEWVSAIIGSGSITYYADSVKGRFTISRDNSKNTLYLQMNSLRAE | |
| | DTAVYYCAKGWFGGFNYWGQGTLVTVSSASTKGPSVFPLAPSS | |
| | KSTSGGTAALGCLVKDYFPEPVTVSWNSGALTSGVHTFPAVLQS | |
| | SGLYSLSSVVTVPSSSLGTQTYICNVNHKPSNTKVDKKVEPKSCH | |
| | HHHHH | |

Constructs for binding to AXL

| | | |
|---|---|---|
| E200 + AXL | GHNYTTRNILPGLNITSDVVMTQSPLSLPVTLGQPASISCRSSQNI | 206 |
| binder (nfP2X₇ | VHTNGNTYLEWYQQKPGKAPELLIYKVSNRFSGVPDRFSGSGSG | |
| epitope | TDFTLKISRVEAEDVGVYYCFQGSHLLEPFTFGQGTKLEIKRTVAA | |
| underlined), | PSVFIFPPSDEQLKSGTASVVCLLNNFYPREAKVQWKVDNALQS | |
| EP2431393, | GNSQESVTEQDSKDSTYSLSSTLTLSKADYEKHKVYACEVTHQG | |
| B095-1_LC | LSSPVTKSFNRGECHHHHHH | |
| AXL, EP2431393, | QVTLKESGPVLVKPTETLTLTCTVSGFSLSSFGVDWVRQAPGKG | 207 |
| B095-2_HC | LEWMGVIWGGGSTNYNSALKSRLTISKDNSKSQVVLTMTNMDPV | |
| | DTATYYCAGEGSKYGAWFAYWGQGTLVTVSSASTKGPSVFPLA | |
| | PSSKSTSGGTAALGCLVKDYFPEPVTVSWNSGALTSGVHTFPAV | |
| | LQSSGLYSLSSVVTVPSSSLGTQTYICNVNHKPSNTKVDKKVEPK | |
| | SCHHHHHH | |

Constructs for binding to CD138

| | | |
|---|---|---|
| E200 + CD138 | GHNYTTRNILPGLNITSDIQMTQSTSSLSASLGDRVTISCSASQGI | 208 |
| binder (nfP2X₇ | NNYLNWYQQKPDGTVELLIYYTSTLQSGVPSRFSGSGSGTDYSL | |
| epitope | TISNLEPEDIGTYYCQQYSKLPRTFGGGTKLEIKRTVAAPSVFIFPP | |
| underlined), | SDEQLKSGTASVVCLLNNFYPREAKVQWKVDNALQSGNSQESV | |
| US20090175863, | TEQDSKDSTYSLSSTLTLSKADYEKHKVYACEVTHQGLSSPVTKS | |
| B096-1_LC | FNRGECHHHHHH | |
| CD138, | QVQLQQSGSELMMPGASVKISCKATGYTFSNYWIEWVKQRPGH | 209 |
| US20090175863, | GLEWIGEILPGTGRTIYNEKFKGKATFTADISSNTVQMQLSSLTSE | |
| B096-2_HC | DSAVYYCARRDYYGNFYYAMDYWGQGTSVTVSSASTKGPSVFP | |
| | LAPSSKSTSGGTAALGCLVKDYFPEPVTVSWNSGALTSGVHTFP | |
| | AVLQSSGLYSLSSVVTVPSSSLGTQTYICNVNHKPSNTKVDKKVE | |
| | PKSCHHHHHH | |

Constructs for binding to CLDN6

| | | |
|---|---|---|
| E200 + CLDN6 | GHNYTTRNILPGLNITSDIQMTQSPSSLSASVGDRVTITCRISENIY | 210 |
| binder (nfP2X₇ | SYLAWYQQKPGKAPKLLIYNAKILVEGVPSRFSGSGSGTDFTLTIS | |
| epitope | SLQPEDFATYYCQHHYTVPWTFGQGTKLEIKRTVAAPSVFIFPPS | |
| underlined), | DEQLKSGTASVVCLLNNFYPREAKVQWKVDNALQSGNSQESVT | |
| WO2019056023, | EQDSKDSTYSLSSTLTLSKADYEKHKVYACEVTHQGLSSPVTKSF | |
| B097-1_LC | NRGECHHHHHH | |
| CLDN6, | EVQLLESGGGLVQPGGSMRLSCAASGFTFSNYWMNWVRQAPG | 211 |
| WO2019056023, | KGLEWVAQIRLKSDNYATHYADSVKGRFTISRDDSKNTVYLQMN | |
| B097-2_HC | SLRAEDTGVYYCNDGPPSGYWGQGTLLTVSSASTKGPSVFPLAP | |
| | SSKSTSGGTAALGCLVKDYFPEPVTVSWNSGALTSGVHTFPAVL | |
| | QSSGLYSLSSVVTVPSSSLGTQTYICNVNHKPSNTKVDKKVEPKS | |
| | CHHHHHH | |

Constructs for binding to Her4

| | | |
|---|---|---|
| E200 + Her4 | GHNYTTRNILPGLNITSQSVLTQPASVSGSPGQSITISCAGTSSDV | 212 |
| binder (nfP2X₇ | GGSSYVSWYQQHPGKAPKLMIYYDSYRPSGVSNRFSGSKSGNT | |
| epitope | ASLTISGLQAEDEADYYCSSNTYYSTRVFGGGTKLAVLGKRTVAA | |
| underlined), | PSVFIFPPSDEQLKSGTASVVCLLNNFYPREAKVQWKVDNALQS | |
| WO2021116119, | GNSQESVTEQDSKDSTYSLSSTLTLSKADYEKHKVYACEVTHQG | |
| B098-1_LC | LSSPVTKSFNRGECHHHHHH | |
| Her4, | EVQLVESGGSLVKPGGSLRLSCAASGFTFSNYYMNWVRQAPGK | 213 |
| WO2021116119, | GLEWISSIDGSSRYIDYADFVKGRFTISRDNATNSLYLQMNSLRAE | |
| B098-2_HC | DTAVYYCVRSSSDYFGGGMDVWGRGTLVTVSSASTKGPSVFPL | |
| | APSSKSTSGGTAALGCLVKDYFPEPVTVSWNSGALTSGVHTFPA | |
| | VLQSSGLYSLSSVVTVPSSSLGTQTYICNVNHKPSNTKVDKKVEP | |
| | KSCHHHHHH | |

Constructs for binding to Claudin 18.2

| | | |
|---|---|---|
| E200 + Claudin | GHNYTTRNILPGLNITSDIVMTQSPSSLTVTAGEKVTMSCKSSQSL | 214 |
| 18.2 binder | LNSGNQKNYLTWYQQKPGQPPKLLIYWASTRESGVPDRFTGSG | |
| (nfP2X₇ epitope | SGTDFTLTISSVQAEDLAVYYCQNDYSYPFTFGSGTKLEIKRTVAA | |
| underlined), | PSVFIFPPSDEQLKSGTASVVCLLNNFYPREAKVQWKVDNALQS | |
| SG10201609510 | GNSQESVTEQDSKDSTYSLSSTLTLSKADYEKHKVYACEVTHQG | |
| U, B099-1_LC | LSSPVTKSFNRGECHHHHHH | |
| Claudin 18.2, | QVQLQQPGAELVRPGASVKLSCKASGYTFTSYWINWVKQRPGQ | 215 |
| SG10201609510 | GLEWIGNIYPSDSYTNYNQKFKDKATLTVDKSSSTAYMQLSSPTS | |
| U, B099-2_HC | EDSAVYYCTRSWRGNSFDYWGQGTTLTVSSASTKGPSVFPLAP | |
| | SSKSTSGGTAALGCLVKDYFPEPVTVSWNSGALTSGVHTFPAVL | |
| | QSSGLYSLSSVVTVPSSSLGTQTYICNVNHKPSNTKVDKKVEPKS | |
| | CHHHHHH | |

Constructs for binding to O-acetylated GD2

| | | |
|---|---|---|
| E200 + O- | GHNYTTRNILPGLNITSDVVMTQSPLSLPVTLGQPASISCRSSQSL | 216 |
| acetylated GD2 | LKNNGNTFLHWYQQRPGQSPRLLIYKVSNRLSGVPDRFSGSGSG | |
| binder (nfP2X₇ | TDFTLKISRVEAEDVGVYFCSQSTHIPYTFGGGTKVEIKRTVAAPS | |
| epitope | VFIFPPSDEQLKSGTASVVCLLNNFYPREAKVQWKVDNALQSGN | |
| underlined), | SQESVTEQDSKDSTYSLSSTLTLSKADYEKHKVYACEVTHQGLSS | |
| EP3269739A1, | PVTKSFNRGECHHHHHH | |
| B100-1_LC | | |
| O-acetylated | EVQLVESGGGLVQPGRSLRLSCTTSEFTFTDYYMTWVRQAPGK | 217 |
| GD2, | GLEWLGFIRNRANGYTTEYNPSVKGRFTISRDNSKSILYLQMNSL | |
| EP3269739A1, | KTEDTAVYYCARVSNWAFDYWGQGTLVTVSSASTKGPSVFPLAP | |
| B100-2_HC | SSKSTSGGTAALGCLVKDYFPEPVTVSWNSGALTSGVHTFPAVL | |
| | QSSGLYSLSSVVTVPSSSLGTQTYICNVNHKPSNTKVDKKVEPKS | |
| | CHHHHHH | |

Constructs for binding to GD3

| | | |
|---|---|---|
| E200 + GD3 | GHNYTTRNILPGLNITSDIQMTQSPSSLSASVGDRVTITCSASQDI | 218 |
| binder (nfP2X₇ | SNYLNWYQQKPDKAVKLLIFYSSNLHSGVPSRFSGGGSGTDYTL | |
| epitope | TISSLQPEDIATYFCHQYSKLPWTFGQGTKVEIKRTVAAPSVFIFP | |
| underlined), | PSDEQLKSGTASVVCLLNNFYPREAKVQWKVDNALQSGNSQES | |
| US7253263, | VTEQDSKDSTYSLSSTLTLSKADYEKHKVYACEVTHQGLSSPVTK | |
| B101-1_LC | SFNRGECHHHHHH | |
| GD3, | EVQLVESGGDFVQPGGSLRVSCAASGFAFSHYAMSWVRQAPGK | 219 |
| US7253263, | GLEWVAYISSGGSGTYYSDSVKGRFTISRDNSKNTLYLQMRSLR | |
| B101-2_HC | AEDSAVYFCTRVKLGTYYFDSWGQGTLLTVSSASTKGPSVFPLA | |
| | PSSKSTSGGTAALGCLVKDYFPEPVTVSWNSGALTSGVHTFPAV | |
| | LQSSGLYSLSSVVTVPSSSLGTQTYICNVNHKPSNTKVDKKVEPK | |
| | SCHHHHHH | |

Constructs for binding to GM2

| | | |
|---|---|---|
| E200 + GM2 | GHNYTTRNILPGLNITSDIQLTQSPSSLSASPGDRVTITCSASSSVS | 220 |
| binder (nfP2X₇ | YMHWFQQKPGKAPKLWIYSTSNLASGVPSRFSGSGSGTSYSLTI | |
| epitope | SRLQPEDIATYYCQQRSSYPYTFGGGTKVEIKRTVAAPSVFIFPPS | |
| underlined), | DEQLKSGTASVVCLLNNFYPREAKVQWKVDNALQSGNSQESVT | |
| US5939532, | EQDSKDSTYSLSSTLTLSKADYEKHKVYACEVTHQGLSSPVTKSF | |
| B102-1_LC | NRGECHHHHHH | |
| GM2, | EVQLVQSGAEVKKPGASVKVSCKASGYTFTDYNMDWVRQAPGQ | 221 |
| US5939532, | GLEWMGYIYPNNGGTGYNQKFKSKVTITVDTSTSTAYMELHSLR | |
| B102-2_HC | SEDTAVYYCATYGHYYGYMFAYWGQGTLVTVSSASTKGPSVFPL | |
| | APSSKSTSGGTAALGCLVKDYFPEPVTVSWNSGALTSGVHTFPA | |
| | VLQSSGLYSLSSVVTVPSSSLGTQTYICNVNHKPSNTKVDKKVEP | |
| | KSCHHHHHH | |

Constructs for binding to TM4SF1

| | | |
|---|---|---|
| E200 + TM4SF1 | GHNYTTRNILPGLNITSAVVMTQTPLSLPVSLGDQASISCRSSQSL | 222 |
| binder (nfP2X₇ | VHSNGNTYLHWYMQKPGQSPKVLIYKVSNRFSGVPDRFSGSGS | |
| epitope | GTDFTLKISRVEADDLGIYFCSQSTHIPLAFGAGTKLELKRTVAAP | |
| underlined), | SVFIFPPSDEQLKSGTASVVCLLNNFYPREAKVQWKVDNALQSG | |
| WO2015054427A | NSQESVTEQDSKDSTYSLSSTLTLSKADYEKHKVYACEVTHQGL | |
| 1, B103-1_LC | SSPVTKSFNRGECHHHHHH | |
| TM4SF1, | EVILVESGGGLVKPGGSLKLSCAASGFTFSSFAMSWVRQTPEKR | 223 |
| WO2015054427A | LEWVATISSGSIYIYYTDGVKGRFTISRDNAKNTVHLQMSSLRSED | |
| 1, B103-2_HC | TAMYYCARRGIYYGYDGYAMDYWGQGTSVTVSSASTKGPSVFP | |
| | LAPSSKSTSGGTAALGCLVKDYFPEPVTVSWNSGALTSGVHTFP | |
| | AVLQSSGLYSLSSVVTVPSSSLGTQTYICNVNHKPSNTKVDKKVE | |
| | PKSCHHHHHH | |

Constructs for binding to CD147

| | | |
|---|---|---|
| E200 + CD147 | GHNYTTRNILPGLNITSDIQMTQSPSTLSASVGDRVTLSCKASENV | 224 |
| binder (nfP2X₇ | GTYVSWYQQKPGKAPKLLIYGASNRYTGVPSRFTGSGSGTDFTL | |
| epitope | TISSLQPEDFATYYCGQSYSYPFTFGSGTKLEIKRTVAAPSVFIFP | |
| underlined), | PSDEQLKSGTASVVCLLNNFYPREAKVQWKVDNALQSGNSQES | |
| WO2017186182, | VTEQDSKDSTYSLSSTLTLSKADYEKHKVYACEVTHQGLSSPVTK | |
| B104-1_LC | SFNRGECHHHHHH | |
| CD147, | EVQLVESGGGLVQPGGSLRLSCAASGFTFSNFWMNWVRQAPG | 225 |
| WO2017186182, | KGLEWVSEIRLKSNNYATHYAESVKGRFTISRDDSKNTLYLQMNS | |
| B104-2_HC | LKTEDTAVYYCTSYDYEYWGQGTLVTVSAASTKGPSVFPLAPSS | |
| | KSTSGGTAALGCLVKDYFPEPVTVSWNSGALTSGVHTFPAVLQS | |
| | SGLYSLSSVVTVPSSSLGTQTYICNVNHKPSNTKVDKKVEPKSCH | |
| | HHHHH | |

Constructs for binding to CEACAM5

| | | |
|---|---|---|
| E200 + CEACAM5 | GHNYTTRNILPGLNITSDIQLTQSPSSLSASVGDRVTITCKASQDV | 226 |
| binder (nfP2X₇ | GTSVAWYQQKPGKAPKLLIYWTSTRHTGVPSRFSGSGSGTDFTF | |
| epitope | TISSLQPEDIATYYCQQYSLYRSFGQGTKVEIKRTVAAPSVFIFPPS | |
| underlined), | DEQLKSGTASVVCLLNNFYPREAKVQWKVDNALQSGNSQESVT | |
| WO2015069430, | EQDSKDSTYSLSSTLTLSKADYEKHKVYACEVTHQGLSSPVTKSF | |
| B105-1_LC | NRGECHHHHHH | |
| CEACAM5, | EVQLVESGGGVVQPGRSLRLSCSASGFDFTTYWMSWVRQAPG | 227 |
| WO2015069430, | KGLEWIGEIHPDSSTINYAPSLKDRFTISRDNAKNTLFLQMDSLRP | |
| B105-2_HC | EDTGVYFCASLYFGFPWFAYWGQGTPVTVSSASTKGPSVFPLAP | |
| | SSKSTSGGTAALGCLVKDYFPEPVTVSWNSGALTSGVHTFPAVL | |
| | QSSGLYSLSSVVTVPSSSLGTQTYICNVNHKPSNTKVDKKVEPKS | |
| | CHHHHHH | |

Constructs for binding to VEGFR-1

| | | |
|---|---|---|
| E200 + VEGFR-1 | GHNYTTRNILPGLNITSDIVMTQSPDSLAVSLGERATINCSASSSV | 228 |
| binder (nfP2X₇ | SYMHWYQQKPGQPPKLLIYRTSNLASGVPDRFSGSGSGTDFTLT | |
| epitope | ISSLQAEDVAVYYCHQWSMYTFGQGTKVEIKRTVAAPSVFIFPPS | |
| underlined), | DEQLKSGTASVVCLLNNFYPREAKVQWKVDNALQSGNSQESVT | |
| US7615214, | EQDSKDSTYSLSSTLTLSKADYEKHKVYACEVTHQGLSSPVTKSF | |
| B106-1_LC | NRGECHHHHHH | |
| VEGFR-1, | QVQLVQSGAEVKKPGASVKVSCKASGYTFINYNMHWVRQAPGQ | 229 |
| US7615214, | GLEWMGAIFPGNGFTSYNQKFKGRVTITVDKSTSTAYMELSSLRS | |
| | EDTAVYYCARDGDYYFDYWGQGTLVTVSSASTKGPSVFPLAPSS | |
| B106-2_HC | KSTSGGTAALGCLVKDYFPEPVTVSWNSGALTSGVHTFPAVLQS | |
| | SGLYSLSSVVTVPSSSLGTQTYICNVNHKPSNTKVDKKVEPKSCH | |
| | HHHHH | |

Constructs for binding to Podoplanin (PDPN)

| | | |
|---|---|---|
| E200 + PDPN | GHNYTTRNILPGLNITSDVLMTQTPLSLPVSLGDQASISCRSSRNI | 230 |
| binder (nfP2X₇ | VQSTGNTYLEWYLQKPGQSPKLLIFKVSNRFSGVPDRFSGSGSG | |
| epitope | TDFTLKISRVEAEDLGVYYCFQGSHVPPWTFGGGTKLEIKRTVAA | |
| underlined), | PSVFIFPPSDEQLKSGTASVVCLLNNFYPREAKVQWKVDNALQS | |
| | GNSQESVTEQDSKDSTYSLSSTLTLSKADYEKHKVYACEVTHQG | |
| US20160347834 | LSSPVTKSFNRGECHHHHHH | |
| A1, B107-1_LC | | |
| PDPN, | DVQLVESGGGLVQPGGSRKLSCAASGFTFSGFGMHWVRQAPEK | 231 |
| US20160347834 | GLEWVAYISSVSSRIYYADTVKGRFTISRDNPKNTLFLQMTSLRSE | |
| A1, B107-2_HC | DTAMYYCAREQTGPAWFAYWGQGTLVTVSAASTKGPSVFPLAP | |
| | SSKSTSGGTAALGCLVKDYFPEPVTVSWNSGALTSGVHTFPAVL | |
| | QSSGLYSLSSVVTVPSSSLGTQTYICNVNHKPSNTKVDKKVEPKS | |
| | CHHHHHH | |

Constructs for binding to WT1

| | | |
|---|---|---|
| E200 + WT1 | GHNYTTRNILPGLNITSQTWTQPPSASGTPGQRVTISCSGSSSNI | 232 |
| binder (nfP2X₇ | GSNYVYWYQQLPGTAPKLVLLIYRSNQRPSGVPDRFSGSKSGTS | |
| epitope | ASLAISGPRSVDEADYYCAAWDDSLNGVVFGGGTKLTVLGKRTV | |
| underlined), | AAPSVFIFPPSDEQLKSGTASVVCLLNNFYPREAKVQWKVDNALQ | |
| EP2694553A2, | SGNSQESVTEQDSKDSTYSLSSTLTLSKADYEKHKVYACEVTHQ | |
| B108-1_LC | GLSSPVTKSFNRGECHHHHHH | |
| WT1, | QVQLVQSGAEVKKPGSSVKVSCKASGGTFSSYAISWVRQAPGQ | 233 |
| EP2694553A2, | GLEVHWMGGIIPIFGTANYAQKFQGRVTITADESTSTAYMELSSLR | |
| B108-2_HC | SEDTAVYYCARRIPPYYGMDVWGQGTTVTVSSASTKGPSVFPLA | |
| | PSSKSTSGGTAALGCLVKDYFPEPVTVSWNSGALTSGVHTFPAV | |
| | LQSSGLYSLSSVVTVPSSSLGTQTYICNVNHKPSNTKVDKKVEPK | |
| | SCHHHHHH | |

Constructs for binding to GPC2

| | | |
|---|---|---|
| E200 + GPC2 | GHNYTTRNILPGLNITSENVLTQSPAIMSASLGEKVTMSCRASSSV | 234 |
| binder (nfP2X₇ | NYIYWYQQKSDASPKLWIYYTSNLAPGVPARFSGSGSGNSYSLTI | |
| epitope | SSMEGEDAATYYCQQFSSSPSTFGTGTKLELKRTVAAPSVFIFPP | |
| underlined), | SDEQLKSGTASVVCLLNNFYPREAKVQWKVDNALQSGNSQESV | |
| WO2020033430, | TEQDSKDSTYSLSSTLTLSKADYEKHKVYACEVTHQGLSSPVTKS | |
| B109-1_LC | FNRGECHHHHHH | |
| GPC2, | EVQLQQSGPELVKPGASVKMSCKASRFTFTDYNIHWVKQSPGKT | 235 |
| WO2020033430, | LEWIGYINPNNGDIFYKQKFNGKATLTINKSSNTAYMELRSLTSED | |
| B109-2_HC | SAVYYCVRSSNIRYTFDRFFDVWGTGTTVTVSSASTKGPSVFPLA | |
| | PSSKSTSGGTAALGCLVKDYFPEPVTVSWNSGALTSGVHTFPAV | |
| | LQSSGLYSLSSVVTVPSSSLGTQTYICNVNHKPSNTKVDKKVEPK | |
| | SCHHHHHH | |

Constructs for binding to FGFR4

| | | |
|---|---|---|
| E200 + FGFR4 | GHNYTTRNILPGLNITSDIQMTQSPSSLSASVGDRVTITCRASESV | 236 |
| binder (nfP2X₇ | STLMHWYQQKPGKAPKLLIYGTSNLESGVPSRFSGSGSGTDFTL | |
| epitope | TISSLQPEDFATYYCQQSWNDPPTFGGGTKVEIKRTVAAPSVFIF | |
| underlined), | PPSDEQLKSGTASVVCLLNNFYPREAKVQWKVDNALQSGNSQE | |
| WO2019034427A | SVTEQDSKDSTYSLSSTLTLSKADYEKHKVYACEVTHQGLSSPVT | |
| 1, B110-1_LC | KSFNRGECHHHHHH | |
| FGFR4, | EVQLVESGGGLVQPGGSLRLSCAASGFTFSNYYMSWVRQAPGK | 237 |
| WO2019034427A | GLEWVATINPSGTRTYYPDSVKGRFTISRDNAKNSLYLQMNSLRA | |
| 1, B110-2_HC | EDTAVYYCARLYNNYAFDYWGQGTLVTVSSASTKGPSVFPLAPS | |
| | SKSTSGGTAALGCLVKDYFPEPVTVSWNSGALTSGVHTFPAVLQ | |
| | SSGLYSLSSVVTVPSSSLGTQTYICNVNHKPSNTKVDKKVEPKSC | |
| | HHHHHH | |

Constructs for binding to EphB4

| | | |
|---|---|---|
| E200 + EphB4 | GHNYTTRNILPGLNITSDIQMTQSPSSLSASVGDRVTITCRASQDV | 238 |
| binder (nfP2X₇ | STAVAWYQQKPGKAPKLLIYSASFLYSGVPSRFSGSGSGTDFTLT | |
| epitope | ISSLQPEDFATYYCQQTAQTPETFGQGTKVEIKRTVAAPSVFIFPP | |
| underlined), | SDEQLKSGTASVVCLLNNFYPREAKVQWKVDNALQSGNSQESV | |
| EP1973950, | TEQDSKDSTYSLSSTLTLSKADYEKHKVYACEVTHQGLSSPVTKS | |
| B111-1_LC | FNRGECHHHHHH | |
| EphB4, | EVQLVESGGGLVQPGGSLRLSCAASGFTISGYYIHWVRQAPGKG | 239 |
| EP1973950, | LEWVGGIYLYSGSTDYADSVKGYADSVKGRFTISADTSKNTAYLQ | |
| B111-2_HC | MNSLRAEDTAVYYCARGSGLRLGGLDYAMDYWGQGTLVTASTK | |
| | GPSVFPLAPSSKSTSGGTAALGCLVKDYFPEPVTVSWNSGALTS | |
| | GVHTFPAVLQSSGLYSLSSVVTVPSSSLGTQTYICNVNHKPSNTK | |
| | VDKKVEPKSCHHHHHH | |

Constructs for binding to STEAP-1

| | | |
|---|---|---|
| E200 + STEAP-1 | GHNYTTRNILPGLNITSDIQMTQSPSSLSASVGDRVTITCKSSQSL | 240 |
| binder (nfP2X₇ | LYRSNQKNYLAWYQQKPGKAPKLLIYWASTRESGVPSRFSGSGS | |
| epitope | GTDFTLTISSLQPEDFATYYCQQYYNYPRTFGQGTKVEIKRTVAA | |
| underlined), | PSVFIFPPSDEQLKSGTASVVCLLNNFYPREAKVQWKVDNALQS | |
| WO2015112909, | GNSQESVTEQDSKDSTYSLSSTLTLSKADYEKHKVYACEVTHQG | |
| B112-1_LC | LSSPVTKSFNRGECHHHHHH | |
| STEAP-1, | EVQLVESGGGLVQPGGSLRLSCAVSGYSITSDYAWNWVRQAPG | 241 |
| WO2015112909, | KGLEWVGYISNSGSTSYNPSLKSRFTISRDTSKNTLYLQMNSLRA | |
| B112-2_HC | EDTAVYYCARERNYDYDDYYYAMDYWGQGTLVTVSSASTKGPS | |
| | VFPLAPSSKSTSGGTAALGCLVKDYFPEPVTVSWNSGALTSGVH | |
| | TFPAVLQSSGLYSLSSVVTVPSSSLGTQTYICNVNHKPSNTKVDK | |
| | KVEPKSCHHHHHH | |

Constructs for binding to STEAP-2

| | | |
|---|---|---|
| E200 + STEAP-2 | GHNYTTRNILPGLNITSDIQMTQSPSTLSASVGDRVTITCRASQSIS | 242 |
| binder (nfP2X₇ | SWLAWYQQKPGRAPNLLISKASSLKSGVPSRFSGSGSGTEFTLT | |
| epitope | VSSLQPDDFATYYCQQYYSYSYTFGQGTKLEIKRTVAAPSVFIFP | |
| underlined), | PSDEQLKSGTASVVCLLNNFYPREAKVQWKVDNALQSGNSQES | |
| US20180104357, | VTEQDSKDSTYSLSSTLTLSKADYEKHKVYACEVTHQGLSSPVTK | |
| B113-1_LC | SFNRGECHHHHHH | |
| STEAP-2, | QVQLVESGGGVVQPGRSLRLSCVASGFTISSYGMNWVRQAPGK | 243 |
| US20180104357, | GLEWVAVISYDGGNKYSVDSVKGRFTISRDNSKNTLYLQMNSLR | |
| B113-2_HC | AEDSAVYYCARGRYFDLWGRGTLVTVSSASTKGPSVFPLAPSSK | |
| | STSGGTAALGCLVKDYFPEPVTVSWNSGALTSGVHTFPAVLQSS | |
| | GLYSLSSVVTVPSSSLGTQTYICNVNHKPSNTKVDKKVEPKSCHH | |
| | HHHH | |

Constructs for binding to IL11Ra

| | | |
|---|---|---|
| E200 + IL11Ra | GHNYTTRNILPGLNITSDIVLTQSPATLSMTPGDSVSLSCRASQSI | 244 |
| binder (nfP2X₇ | SNNLHWYQQKSHESPRLLIKYASQSISGIPSRFSGSGSGTDFTLS | |
| epitope | FNSVETEDFGVYFCQQRYSWPLTFGAGTKLEMKRTVAAPSVFIF | |
| underlined), | PPSDEQLKSGTASVVCLLNNFYPREAKVQWKVDNALQSGNSQE | |
| WO2018109170, | SVTEQDSKDSTYSLSSTLTLSKADYEKHKVYACEVTHQGLSSPVT | |
| B114-1_LC | KSFNRGECHHHHHH | |
| IL11Ra, | QVQLQQPGAELVRPGSSVKLSCKASGYTFTNYWMHWLKQRPVQ | 245 |
| WO2018109170, | GLEWIGNIGPSDSKTHYNQKFKDKATLTVDKSSSTAYMQLNSLTS | |
| B114-2_HC | EDSAVYYCARGDYVLFTYWGQGTLVTVSAASTKGPSVFPLAPSS | |
| | KSTSGGTAALGCLVKDYFPEPVTVSWNSGALTSGVHTFPAVLQS | |
| | SGLYSLSSVVTVPSSSLGTQTYICNVNHKPSNTKVDKKVEPKSCH | |
| | HHHHH | |

Constructs for binding to CD163

| | | |
|---|---|---|
| E200 + CD163 | GHNYTTRNILPGLNITSDIVMTQSPSSLSASVGDRVTITCRASQSV | 246 |
| binder (nfP2X₇ | SSDVAWFQQKPGKSPKPLIYYASNRYSGVPSRFSGSGSGTDFTL | |
| epitope | TISSLQAEDFAVYFCGQDYTSPRTFGGGTKLEIKRTVAAPSVFIFP | |
| underlined), | PSDEQLKSGTASVVCLLNNFYPREAKVQWKVDNALQSGNSQES | |
| WO2011039510A | VTEQDSKDSTYSLSSTLTLSKADYEKHKVYACEVTHQGLSSPVTK | |
| 2, B115-1_LC | SFNRGECHHHHHH | |
| CD163, | QVQLQESGPGLVKPSETLSLTCTVSGYSITSDYAWNWIRQFPGN | 247 |
| WO2011039510A | KLEWMGYITYSGSTYYNPSLKSRVTISVDTSKNQFSLKLSSVTAA | |
| 2, B115-2_HC | DTATYYCVSGTYYFDYWGQGTTLTVSSASTKGPSVFPLAPSSKS | |
| | TSGGTAALGCLVKDYFPEPVTVSWNSGALTSGVHTFPAVLQSSG | |
| | LYSLSSVVTVPSSSLGTQTYICNVNHKPSNTKVDKKVEPKSCHHH | |
| | HHH | |

Constructs for binding to Chlorotoxin

| | | |
|---|---|---|
| E200 + CLTX | GHNYTTRNILPGLNITSMCMPCFTTDHQMARKCDDCCGGKGRG | 248 |
| binder (nfP2X₇ | KCYGPQCLCRKRTVAAPSVFIFPPSDEQLKSGTASVVCLLNNFYP | |
| epitope | REAKVQWKVDNALQSGNSQESVTEQDSKDSTYSLSSTLTLSKAD | |
| underlined), | YEKHKVYACEVTHQGLSSPVTKSFNRGECHHHHHH | |
| WO2017066481A | | |
| 1, B116-1_LC | | |
| CLTX, | MCMPCFTTDHQMARKCDDCCGGKGRGKCYGPQCLCRASTKGP | 249 |
| WO2017066481A | SVFPLAPSSKSTSGGTAALGCLVKDYFPEPVTVSWNSGALTSGV | |
| 1, B116-2_HC | HTFPAVLQSSGLYSLSSVVTVPSSSLGTQTYICNVNHKPSNTKVD | |
| | KKVEPKSCHHHHHH | |

Constructs for binding to CD206 Nanobody VH

| | | |
|---|---|---|
| E200 + CD206 | GHNYTTRNILPGLNITSQVQLQESGGGLVQPGGSLRLSCAASGFS | 250 |
| binder (nfP2X₇ | LDYYAIGWFRQAPGKEREGISCISYKGGSTTYADSVKGRFTISKD | |
| epitope | NAKNTAYLQMNSLKPEDTGIYSCAAGFVCYNYDYWGQGTQVTV | |
| underlined), | SSASTKGPSVFPLAPSSKSTSGGTAALGCLVKDYFPEPVTVSWN | |
| WO2014140376A | SGALTSGVHTFPAVLQSSGLYSLSSVVTVPSSSLGTQTYICNVNH | |
| 1, B117-2_HC | KPSNTKVDKKVEPKSCHHHHHH | |

Constructs for binding to IL1RAP

| | | |
|---|---|---|
| E200 + IL1RAP | GHNYTTRNILPGLNITSDVQMTQSPSSLSASVGDRVTITCQASQSI | 251 |
| binder (nfP2X₇ | YSFLSWYQQKPGQAPKLLIYAASDLESGVPSRFSGSGSGTDFTLT | |
| epitope | ISSLQPEDFATYYCQCNYIIDYGAFGQGTKVVIKRTVAAPSVFIFPP | |
| underlined), | SDEQLKSGTASVVCLLNNFYPREAKVQWKVDNALQSGNSQESV | |
| WO2017191325A | TEQDSKDSTYSLSSTLTLSKADYEKHKVYACEVTHQGLSSPVTKS | |
| 9, B118-1_LC | FNRGECHHHHHH | |
| IL1RAP, | EVQLEESGGRLVQPGTSLRLSCAVSGFSLSSYDMSWVRQAPGK | 252 |
| WO2017191325A | GLEWVSTIYIGGTTAYASWPKGRFTISKTNSKNTLYLQMNSLRAE | |
| 9, B118-2_HC | DTAVYFCARLQGANYYNSLALWGQGTLVTVSSASTKGPSVFPLA | |
| | PSSKSTSGGTAALGCLVKDYFPEPVTVSWNSGALTSGVHTFPAV | |
| | LQSSGLYSLSSVVTVPSSSLGTQTYICNVNHKPSNTKVDKKVEPK | |
| | SCHHHHHH | |

Constructs for binding to MICA

| | | |
|---|---|---|
| E200 + MICA | GHNYTTRNILPGLNITSAIQLTQSPSSLSASVGDRVTITCRASQGIS | 253 |
| binder (nfP2X₇ | SALAWYQQKPGKVPKSLIYDASSLESGVPSRFSGSGSGTDFTLTI | |
| epitope | SSLQPEDFATYYCQQFNSYPITFGQGTRLEIKRTVAAPSVFIFPPS | |
| underlined), | DEQLKSGTASVVCLLNNFYPREAKVQWKVDNALQSGNSQESVT | |
| WO2019183551, | EQDSKDSTYSLSSTLTLSKADYEKHKVYACEVTHQGLSSPVTKSF | |
| B119-1_LC | NRGECHHHHHH | |
| MICA, | QVQLVESGGGVVQPGRSLRLSCAASGFTFSNYAMHWVRQAPGE | 254 |
| WO2019183551, | GLEWVALIWYDGSNKFYGDSVKGRFTISRDNSKNTLYLQMNSLS | |
| B119-2_HC | AEDTAVYYCAREGSGHYWGQGTLVTVSSASTKGPSVFPLAPSSK | |
| | STSGGTAALGCLVKDYFPEPVTVSWNSGALTSGVHTFPAVLQSS | |

Constructs for binding to MAGE-A1 scTCR

| | | |
|---|---|---|
| E200 + MAGE-A1 | GHNYTTRNILPGLNITSMKPTLISVLVIIFILRGTRAQRVTQPEKLLS | 255 |
| binder (nfP2X₇ | VFKGAPVELKCNYSYSGSPELFWYVQYSRQRLQLLLRHISRESIK | |
| epitope | GFTADLNKGETSFHLKKPFAQEEDSAMYYCALRSGGYQKVTFGT | |
| underlined), | GTKLQVIPGGGGSGGGGSGGGGSMGIRLLCRVAFCFLAVGLVDV | |
| AU2018234830A | KVTQSSRYLVKRTGEKVFLECVQDMDHENMFWYRQDPGLGLRLI | |
| 1, B120-1_LC | YFSYDVKMKEKGDIPEGYSVSREKKERFSLILESASTNQTSMYLC | |
| | ASNNRDSYNSPLHFGNGTRLTVTHHHHHH | |

Constructs for binding to MAGE-A1 STCR

| | | |
|---|---|---|
| E200 + MAGE-A1 | GHNYTTRNILPGLNITSMKPTLISVLVIIFILRGTRAQRVTQPEKLLS | 256 |
| binder (nfP2X₇ | VFKGAPVELKCNYSYSGSPELFWYVQYSRQRLQLLLRHISRESIK | |
| epitope | GFTADLNKGETSFHLKKPFAQEEDSAMYYCALRSGGYQKVTFGT | |
| underlined), | GTKLQVIPIQNPDPAVYQLRDSKSSDKSVCLFTDFDSQTNVSQSK | |
| AU2018234830A | DSDVYITDKCVLDMRSMDFKSNSAVAWSNKSDFACANAFNNSIIP | |
| 1, B121-1_alpha | EDTFFPSPESS | |
| chain | | |
| MAGE-A1, | MGIRLLCRVAFCFLAVGLVDVKVTQSSRYLVKRTGEKVFLECVQD | 257 |
| AU2018234830A | MDHENMFWYRQDPGLGLRLIYFSYDVKMKEKGDIPEGYSVSREK | |
| 1, B121-2_beta | KERFSLILESASTNQTSMYLCASNNRDSYNSPLHFGNGTRLTVTD | |
| chain | LKNVFPPEVAVFEPSEAEISHTQKATLVCLATGFYPDHVELSWWV | |
| | NGKEVHSGVCTDPQPLKEQPALNDSRYALSSRLRVSATFWQDP | |
| | RNHFRCQVQFYGLSENDEWTQDRAKPVTQIVSAEAWGRADHHH | |
| | HHH | |

E200 + MAGE-A1 Constructs for binding to MAGE-A1 sTCR/2

| | | |
|---|---|---|
| binder (nfP2X₇ | MKPTLISVLVIIFILRGTRAQRVTQPEKLLSVFKGAPVELKCNYSYS | 258 |
| epitope | GSPELFWYVQYSRQRLQLLLRHISRESIKGFTADLNKGETSFHLK | |
| underlined), | KPFAQEEDSAMYYCALRSGGYQKVTFGTGTKLQVIPIQNPDPAVY | |
| AU2018234830A | QLRDSKSSDKSVCLFTDFDSQTNVSQSKDSDVYITDKCVLDMRS | |
| 1, B122-1_alpha | MDFKSNSAVAWSNKSDFACANAFNNSIIPEDTFFPSPESSGGGG | |
| chain | SGHNYTTRNILPGLNITS | |
| MAGE-A1, | MGIRLLCRVAFCFLAVGLVDVKVTQSSRYLVKRTGEKVFLECVQD | 259 |
| AU2018234830A | MDHENMFWYRQDPGLGLRLIYFSYDVKMKEKGDIPEGYSVSREK | |
| 1, B122-2_beta | KERFSLILESASTNQTSMYLCASNNRDSYNSPLHFGNGTRLTVTD | |
| chain | LKNVFPPEVAVFEPSEAEISHTQKATLVCLATGFYPDHVELSWWV | |
| | NGKEVHSGVCTDPQPLKEQPALNDSRYALSSRLRVSATFWQDP | |
| | RNHFRCQVQFYGLSENDEWTQDRAKPVTQIVSAEAWGRADHHH | |
| | HHH | |

Constructs for binding TRBC1

| | | |
|---|---|---|
| E200 + TRBC1 | GHNYTTRNILPGLNITSDWMTQSPLSLPVSLGDQASISCRSSQRL | 260 |
| binder (nfP2X₇ | VHSNGNTYLHWYLQKPGQSPKLLIYRVSNRFPGVPDRFSGSGSG | |
| epitope | TDFTLKISRVEAEDLGIYFCSQSTHVPYTFGGGTKLEIKRTVAAPS | |
| underlined), Jovi- | VFIFPPSDEQLKSGTASVVCLLNNFYPREAKVQWKVDNALQSGN | |
| 1. | SQESVTEQDSKDSTYSLSSTLTLSKADYEKHKVYACEVTHQGLSS | |
| WO2015132598A | PVTKSFNRGECHHHHHH | |
| 1, B122-1_LC | | |
| TRBC1, Jovi-1, | EVRLQQSGPDLIKPGASVKMSCKASGYTFTGYVMHVWKQRPGQ | 261 |
| WO2015132598A | GLEWIGFINPYNDDIQSNERFRGKATLTSDKSSTTAYMELSSLTSE | |
| 1, B122-2_HC | DSAVYYCARGAGYNFDGAYRFFDFWGQGTTLTVSSASTKGPSV | |
| | FPLAPSSKSTSGGTAALGCLVKDYFPEPVTVSWNSGALTSGVHT | |
| | FPAVLQSSGLYSLSSVVTVPSSSLGTQTYICNVNHKPSNTKVDKK | |
| | VEPKSCHHHHHH | |

Constructs for binding TRBC2

| | | |
|---|---|---|
| E200 + TRBC2 | GHNYTTRNILPGLNITSQPQSVSESPGKTVTISCTRSSGNFASKYV | 262 |
| binder (nfP2X₇ | QWYQQRPGSSPTTVIYENYQRPSGVPDRFSGSIDSSSNSATLTIS | |
| epitope | GLKTEDEADYYCQSYDEVSWFGGGTQLTVLGQPAAKRTVAAPS | |
| underlined), F09, | VFIFPPSDEQLKSGTASVVCLLNNFYPREAKVQWKVDNALQSGN | |
| WO2015132598A | SQESVTEQDSKDSTYSLSSTLTLSKADYEKHKVYACEVTHQGLSS | |
| 1, B123-1_LC | PVTKSFNRGECHHHHHH | |
| TRBC2, F09, | QMQLVQSGAEVKKPGASVKVSCKASGYTFASYYHWVRQAPGQ | 263 |
| WO2015132598A | GLEWGIINPSGGSTSYAQKFQGRVTMTRDTSTSTVYMELSRLRS | |
| 1, B123-2_HC | DDTAVYYCASNRGGSYKSVGMDVWGQGTTVTVSSASTKGPSVF | |
| | PLAPSSKSTSGGTAALGCLVKDYFPEPVTVSWNSGALTSGVHTF | |
| | PAVLQSSGLYSLSSVVTVPSSSLGTQTYICNVNHKPSNTKVDKKV | |
| | EPKSCHHHHHH | |

Constructs for binding urokinase-type
plasminogen activator receptor (uPAR)

| | | |
|---|---|---|
| E200 + uPAR | GHNYTTRNILPGLNITSDIVLTQSPASLAVSLGQRATISCRASKSVS | 264 |
| binder (nfP2X₇ | TSGYSYMHWYQQKPGQPPKLLIYLASNLESGVPARFSGSGSGTD | |
| epitope | FTLDIHPVEEEDAATYYCQHSRELPYTFGGGTKLELKRTVAAPSV | |
| underlined), 7G1, | FIFPPSDEQLKSGTASVVCLLNNFYPREAKVQWKVDNALQSGNS | |
| WO2006094828, | QESVTEQDSKDSTYSLSSTLTLSKADYEKHKVYACEVTHQGLSSP | |
| B124-1_LC | VTKSFNRGECHHHHHH | |
| uPAR, 7G1, | VQLQESGPELKKPGETVKISCKASGYTFTDYSMHWVKQAPGKGL | 265 |
| WO2006094828, | KCMGWINTETTKSTYADDFKGRFALSLETSASTVYLQISNLKNED | |
| B124-2_HC | TATYFCAREASYGEFDYWGQGTTVTVSSASTKGPSVFPLAPSSK | |
| | STSGGTAALGCLVKDYFPEPVTVSWNSGALTSGVHTFPAVLQSS | |
| | GLYSLSSVVTVPSSSLGTQTYICNVNHKPSNTKVDKKVEPKSCHH | |
| | HHHH | |

EGFRvIII targeted CAR

| | | |
|---|---|---|
| EGFRvIII targeted | EVQVLESGGGLVQPGGSLRLSCAASGFTFSSYAMSWVRQAPGK | 266 |
| CAR scFv_(HL- | GLEWVSAISGSGGSTNYADSVKGRFTISRDNSKNTLYLQMNSLR | |
| configuration_ | AEDTAVYYCAGSSGWSEYWGQGTLVTVSSGGGGSGGGGSGG | |
| clone_139)_CD8a_C | GGSDIQMTQSPSSLSASVGDRVTITCRASQGIRNNLAWYQQKPG | |
| D8TM_CD28_CD | KAPKRLIYAASNLQSGVPSRFTGSGSGTEFTLIVSSLQPEDFATYY | |
| 137_CD3zeta | CLQHHSYPLTSGGGTKVEIKTTTPAPRPPTPAPTIASQPLSLRPEA | |
| | CRPAAGGAVHTRGLDFACDIYIWAPLAGTCGVLLLSLVITLYCRSK | |
| | RSRLLHSDYMNMTPRRPGPTRKHYQPYAPPRDFAAYRSKRGRK | |
| | KLLYIFKQPFMRPVQTTQEEDGCSCRFPEEEEGGCELRVKFSRS | |
| | ADAPAYKQGQNQLYNELNLGRREEYDVLDKRRGRDPEMGGKPR | |
| | RKNPQEGLYNELQKDKMAEAYSEIGMKGERRRGKGHDGLYQGL | |
| | STATKDTYDALHMQALPPR | |
| EGFRvIII peptide | LEEKKGNYVVTDH | 267 |

Constructs for binding CD33

| | | |
|---|---|---|
| EGFRvIII- | LEEKKGNYVVTDHDIQLTQSPSTLSASVGDRVTITCRASESLDNY | 268 |
| peptide + CD33 | GIRFLTWFQQKPGKAPKLLMYAASNQGSGVPSRFSGSGSGTEFT | |
| binder (EGFRvIII | LTISSLQPDDFATYYCQQTKEVPWSFGQGTKVEVKRTVAAPSVFI | |
| epitope | FPPSDEQLKSGTASVVCLLNNFYPREAKVQWKVDNALQSGNSQ | |
| underlined) | ESVTEQDSKDSTYSLSSTLTLSKADYEKHKVYACEVTHQGLSSPV | |
| CD33, | TKSFNRGECHHHHHH | |
| Gemtuzumab, | | |
| B030-3_LC | | |
| CD33, | EVQLVQSGAEVKKPGSSVKVSCKASGYTITDSNIHWVRQAPGQS | 269 |
| Gemtuzumab, | LEWIGYIYPYNGGTDYNQKFKNRATLTVDNPTNTAYMELSSLRSE | |
| B030-2_HC | DTAFYYCVNGNPWLAYWGQGTLVTVSSASTKGPSVFPLAPSSKS | |
| | TSGGTAALGCLVKDYFPEPVTVSWNSGALTSGVHTFPAVLQSSG | |
| | LYSLSSVVTVPSSSLGTQTYICNVNHKPSNTKVDKKVEPKSCHHH | |
| | HHH | |

Constructs for binding Her2

| | | |
|---|---|---|
| EGFRvIII- | LEEKKGNYVVTDHDIQMTQSPSSLSASVGDRVTITCRASQDVNTA | 270 |
| peptide + Her2 | VAWYQQKPGKAPKLLIYSASFLYSGVPSRFSGSRSGTDFTLTISS | |
| binder (EGFRvIII | LQPEDFATYYCQQHYTTPPTFGQGTKVEIKRTVAAPSVFIFPPSD | |
| epitope | EQLKSGTASVVCLLNNFYPREAKVQWKVDNALQSGNSQESVTE | |
| underlined) | QDSKDSTYSLSSTLTLSKADYEKHKVYACEVTHQGLSSPVTKSFN | |
| Her2, | RGECHHHHHH | |
| Gemtuzumab, | | |
| B033-3_LC | | |
| Her2, | EVQLVESGGGLVQPGGSLRLSCAASGFNIKDTYIHWVRQAPGKG | 271 |
| Trastuzumab, | LEWVARIYPTNGYTRYADSVKGRFTISADTSKNTAYLQMNSLRAE | |
| B033-2_HC | DTAVYYCSRWGGDGFYAMDYWGQGTLVTVSSASTKGPSVFPLA | |
| | PSSKSTSGGTAALGCLVKDYFPEPVTVSWNSGALTSGVHTFPAV | |
| | LQSSGLYSLSSVVTVPSSSLGTQTYICNVNHKPSNTKVDKKVEPK | |
| | SCHHHHHH | |

CLDN6 targeted CAR

| | | |
|---|---|---|
| CLDN6 targeted | EVQLLESGGGLVQPGGSMRLSCAASGFTFSNYWMNWVRQAPG | 272 |
| CAR scFv_(HL- | KGLEWVAQIRLKSDNYATHYADSVKGRFTISRDDSKNTVYLQMN | |
| configuration_ | SLRAEDTGVYYCNDGPPSGYWGQGTLLTVSSGGGGSGGGGSG | |
| clone_ | GGGSDIQMTQSPSSLSASVGDRVTITCRISENIYSYLAWYQQKPG | |
| Ab3-4)_ | KAPKLLIYNAKILVEGVPSRFSGSGSGTDFTLTISSLQPEDFATYYC | |
| CD8a_CD8TM_ | QHHYTVPWTFGQGTKLEIKTTTPAPRPPTPAPTIASQPLSLRPEA | |
| CD28_CD137_ | CRPAAGGAVHTRGLDFACDIYIWAPLAGTCGVLLLSLVITLYCRSK | |
| CD3zeta | RSRLLHSDYMNMTPRRPGPTRKHYQPYAPPRDFAAYRSKRGRK | |
| | KLLYIFKQPFMRPVQTTQEEDGCSCRFPEEEEGGCELRVKFSRS | |
| | ADAPAYKQGQNQLYNELNLGRREEYDVLDKRRGRDPEMGGKPR | |
| | RKNPQEGLYNELQKDKMAEAYSEIGMKGERRRGKGHDGLYQGL | |
| | STATKDTYDALHMQALPPR | |
| CLDN6 peptide 23- | WTAHAIIRDFYNPLVAEAQKREL | 273 |
| mer | | |
| CLDN6 peptide 13- | TAHAIIRDFYNPL | 274 |
| mer | | |
| CLDN6 peptide 10- | LVAEAQKREL | 275 |
| mer | | |

Constructs for binding CD33

| | | |
|---|---|---|
| CLDN6- | WTAHAIIRDFYNPLVAEAQKRELDIQLTQSPSTLSASVGDRVTITC | 276 |
| peptide + CD33 | RASESLDNYGIRFLTWFQQKPGKAPKLLMYAASNQGSGVPSRFS | |
| binder (CLDN6 | GSGSGTEFTLTISSLQPDDFATYYCQQTKEVPWSFGQGTKVEVK | |
| epitope | RTVAAPSVFIFPPSDEQLKSGTASVVCLLNNFYPREAKVQWKVDN | |
| underlined) | ALQSGNSQESVTEQDSKDSTYSLSSTLTLSKADYEKHKVYACEVT | |
| CD33, | HQGLSSPVTKSFNRGECHHHHHH | |
| Gemtuzumab, | | |
| B030-4 LC | | |
| CD33, | EVQLVQSGAEVKKPGSSVKVSCKASGYTITDSNIHWVRQAPGQS | 277 |
| Gemtuzumab, | LEWIGYIYPYNGGTDYNQKFKNRATLTVDNPTNTAYMELSSLRSE | |
| B030-2_HC | DTAFYYCVNGNPWLAYWGQGTLVTVSSASTKGPSVFPLAPSSKS | |
| | TSGGTAALGCLVKDYFPEPVTVSWNSGALTSGVHTFPAVLQSSG | |
| | LYSLSSVVTVPSSSLGTQTYICNVNHKPSNTKVDKKVEPKSCHHH | |
| | HHH | |

Constructs for binding Her2

| | | |
|---|---|---|
| CLDN6- | WTAHAIIRDFYNPLVAEAQKRELDIQMTQSPSSLSASVGDRVTITC | 278 |
| peptide + Her2 | RASQDVNTAVAWYQQKPGKAPKLLIYSASFLYSGVPSRFSGSRS | |
| binder (CLDN6 | GTDFTLTISSLQPEDFATYYCQQHYTTPPTFGQGTKVEIKRTVAAP | |
| epitope | SVFIFPPSDEQLKSGTASVVCLLNNFYPREAKVQWKVDNALQSG | |
| underlined) | NSQESVTEQDSKDSTYSLSSTLTLSKADYEKHKVYACEVTHQGL | |
| Her2, | SSPVTKSFNRGECHHHHHH | |
| Trastuzumab, | | |
| B033-4_LC | | |
| Her2, | EVQLVESGGGLVQPGGSLRLSCAASGFNIKDTYIHWVRQAPGKG | 279 |
| Trastuzumab, | LEWVARIYPTNGYTRYADSVKGRFTISADTSKNTAYLQMNSLRAE | |
| B033-2_HC | DTAVYYCSRWGGDGFYAMDYWGQGTLVTVSSASTKGPSVFPLA | |
| | PSSKSTSGGTAALGCLVKDYFPEPVTVSWNSGALTSGVHTFPAV | |
| | LQSSGLYSLSSVVTVPSSSLGTQTYICNVNHKPSNTKVDKKVEPK | |
| | SCHHHHHH | |

Constructs for binding B7-H7 (HHLA2)

| | | |
|---|---|---|
| E200 + B7H7 | GHNYTTRNILPGLNITSDIVMTQSPSSLAVSAGEKVTISCLSSQSLF | 280 |
| binder (nfP2X₇ | SSNTKRNYLNWYLQKPGQSPKLLIYHASTRLTGVPGRFIGSGSGT | |
| epitope | DFTLTVSTVQAEDLGDYFCQQHYETPLTFGDGTRLEIKRTVAAPS | |
| underlined), 4.5, | VFIFPPSDEQLKSGTASVVCLLNNFYPREAKVQWKVDNALQSGN | |
| WO2014100823A | SQESVTEQDSKDSTYSLSSTLTLSKADYEKHKVYACEVTHQGLSS | |
| 1, B125-1_LC | PVTKSFNRGECHHHHHH | |
| B7H7, 4.5, | QIQLQESGPGLVKPSQSLSLTCSVTGFSITTGGYYWNWIRQFPGK | 281 |
| WO2014100823A | KLEWMGYIYTSGRTSYNPSLKSRISITRDTSKNQFFLQLNSMTTE | |
| 1, B125-2_HC | DTATYYCADMADKGGWFAYWGQGTLVTVSSASTKGPSVFPLAP | |
| | SSKSTSGGTAALGCLVKDYFPEPVTVSWNSGALTSGVHTFPAVL | |
| | QSSGLYSLSSVVTVPSSSLGTQTYICNVNHKPSNTKVDKKVEPKS | |
| | CHHHHHH | |

Constructs for binding CD34

| | | |
|---|---|---|
| E200 + CD34 | GHNYTTRNILPGLNITSDVLLTQSPLSLPVTLGQPASISCRSSQTIV | 282 |
| binder (nfP2X₇ | HSNGNTYLEWFQQRPGQSPRLLIYQVSNRFSGVPDRFSGSGSG | |
| epitope | TDFTLKISRVEAEDVGVYYCFQGSHVPRTFGGGTKVEIKRTVAAP | |
| underlined), | SVFIFPPSDEQLKSGTASVVCLLNNFYPREAKVQWKVDNALQSG | |
| h4C8b, | NSQESVTEQDSKDSTYSLSSTLTLSKADYEKHKVYACEVTHQGL | |
| US20100311955 | SSPVTKSFNRGECHHHHHH | |
| A1, B126-1_LC | | |
| CD34, h4C8b, | QIQLVQSGSELKKPGASVKVSCKASGYTFTNYGMNWVRQAPGQ | 283 |
| US20100311955 | GLKWMGWINTNTGEPKYAEEFKGRFALSLDTSVSTAYLQINSLKA | |
| A1, B126-2_HC | EDTAVYFCARGYGNYARGAWLAYWGQGTLVTVSSASTKGPSVF | |
| | PLAPSSKSTSGGTAALGCLVKDYFPEPVTVSWNSGALTSGVHTF | |
| | PAVLQSSGLYSLSSVVTVPSSSLGTQTYICNVNHKPSNTKVDKKV | |
| | EPKSCHHHHHH | |

Constructs for binding CD7

| | | |
|---|---|---|
| E200 + CD7 binder | GHNYTTRNILPGLNITSDIQMTQTTSSLSASLGDRVTISCSASQGIS | 284 |
| (nfP2X₇ epitope | NYLNWYQQKPDGTVKLLIYYTSSLHSGVPSRFSGSGSGTDYSLTI | |
| underlined), seq | SNLEPEDIATYYCQQYSKLPYTFGGGTKLEIKRTVAAPSVFIFPPS | |
| 1, | DEQLKSGTASVVCLLNNFYPREAKVQWKVDNALQSGNSQESVT | |
| WO2003051926, | EQDSKDSTYSLSSTLTLSKADYEKHKVYACEVTHQGLSSPVTKSF | |
| B127-1_LC | NRGECHHHHHH | |
| CD7, seq 1, | EVQLVESGGGLVKPGGSLKLSCAASGLTFSSYAMSWVRQTPEK | 285 |
| WO2003051926, | RLEWVASISSGGFTYYPDSVKGRFTISRDNARNILYLQMSSLRSE | |
| B127-2_HC | DTAMYYCARDEVRGYLDVWGAGTTVTVSSASTKGPSVFPLAPSS | |
| | KSTSGGTAALGCLVKDYFPEPVTVSWNSGALTSGVHTFPAVLQS | |
| | SGLYSLSSVVTVPSSSLGTQTYICNVNHKPSNTKVDKKVEPKSCH | |
| | HHHHH | |

Constructs for binding CD7

| | | |
|---|---|---|
| E200 + CD7 binder | GHNYTTRNILPGLNITSMDVQLQESGGGSVQAGGSLRLSCPASG | 286 |
| (nfP2X₇ epitope | YTFSHYCMGWNRQAPGKEREEVATIDTDDTPTYADSVMGRFTIS | |
| underlined), seq | RDNANNALYLQMNDLKPEDTSMYYCAIWMKLRGSCHDRRLEVR | |
| 32, | GQGTQVTVSINASTKGPSVFPLAPSSKSTSGGTAALGCLVKDYFP | |
| US20170226204, | EPVTVSWNSGALTSGVHTFPAVLQSSGLYSLSSVVTVPSSSLGT | |
| B128-1_HC | QTYICNVNHKPSNTKVDKKVEPKSCHHHHHH | |

Constructs for binding GPRC5D

| | | |
|---|---|---|
| E200 + GPRC5D | GHNYTTRNILPGLNITSQSVLTQPPSVSAAPGQKVTIPCSGSRSN | 287 |
| binder (nfP2X₇ | VGNYYVSWYQQLPGTAPKLLIYDNNKRPSGIPDRFSGSKSGTSA | |
| epitope | TLGITGLQTGDEADYFCGTWDGSLSAHVFGTGTKVTVLGRTVAA | |
| underlined), seq | PSVFIFPPSDEQLKSGTASVVCLLNNFYPREAKVQWKVDNALQS | |
| 1. | GNSQESVTEQDSKDSTYSLSSTLTLSKADYEKHKVYACEVTHQG | |
| SG10202007326 | LSSPVTKSFNRGECHHHHHH | |
| Q, B129-1_LC | | |
| GPRC5D, seq 1, | QVQLVQSGSELKKPGASVRVSCTASGYTFTSYYMHWVRQAPGQ | 288 |
| SG10202007326 | GLEWMGVINPNAGSTRYAQKFQGRVTMSTDTSTSTAYMDLSSLR | |
| Q, B129-2_HC | SEDTAVYYCARGMYRSLLFYDPWGQGTLVTVSSASTKGPSVFPL | |
| | APSSKSTSGGTAALGCLVKDYFPEPVTVSWNSGALTSGVHTFPA | |
| | VLQSSGLYSLSSVVTVPSSSLGTQTYICNVNHKPSNTKVDKKVEP | |
| | KSCHHHHHH | |

Constructs for binding TIM-3

| | | |
|---|---|---|
| E200 + TIM-3 | GHNYTTRNILPGLNITSDIQMTQSPSSLSASVGDRVTITCLASQPIG | 289 |
| binder (nfP2X₇ | IWLAWYQQKPGKAPKLLIYAATSLADGVPSRFSGSGSGTDFTFTI | |
| epitope | SSLQPEDIATYYCQQLYSSPWTFGGGTKVEIKRTVAAPSVFIFPPS | |
| underlined), | DEQLKSGTASVVCLLNNFYPREAKVQWKVDNALQSGNSQESVT | |
| h1701-009NKG, | EQDSKDSTYSLSSTLTLSKADYEKHKVYACEVTHQGLSSPVTKSF | |
| EP3587452, | NRGECHHHHHH | |
| B130-1_LC | | |
| TIM-3, h1701- | QVQLVQSGAEVKKPGASVKVSCKASGYTFTDYYMNWVRQAPGQ | 290 |
| 009NKG, | GLEWMGDIIPNKGGSKYNQKFKDRVTMTTDTSTSTAYMELRSLR | |
| EP3587452, | SDDTAVYYCATWGYGSSYRWFDYWGQGTLVTVSSASTKGPSVF | |
| B130-2_HC | PLAPSSKSTSGGTAALGCLVKDYFPEPVTVSWNSGALTSGVHTF | |
| | PAVLQSSGLYSLSSVVTVPSSSLGTQTYICNVNHKPSNTKVDKKV | |
| | EPKSCHHHHHH | |

Constructs for binding to CD191 (CCR1)

| | | |
|---|---|---|
| E200 + CD191 | GHNYTTRNILPGLNITSDIVMTQSPLSLPVTLGEPASISCRSSQSLV | 291 |
| binder (nfP2X₇ | HRNGITFFHWYLQKPGQSPKLLIYKISNRFSGVPDRFSGSGSGTD | |
| epitope | FTLKISRVEAEDVGVYFCSQGTHVPPTFGQGTKLEIKRTVAAPSV | |
| underlined), | FIFPPSDEQLKSGTASVVCLLNNFYPREAKVQWKVDNALQSGNS | |
| hzmAb5- | QESVTEQDSKDSTYSLSSTLTLSKADYEKHKVYACEVTHQGLSSP | |
| 06_LV5HV14, | VTKSFNRGECHHHHHH | |
| EP3656791, | | |
| B131-1_LC | | |
| CD191, hzmAb5- | QVQLQQSGPGLVKPSQTLSITCTVSGFSLNNYGVHWVRQPPGK | 292 |
| 06_LV5HV14, | GLEWLGVIWSAGTTVYNAAAISRLTISKDTSKNQVSFKMSSLTAA | |
| EP3656791, | DTAVYYCAKDGSRYYTAMDYWGQGTLVTVSSASTKGPSVFPLAP | |
| B131-2_HC | SSKSTSGGTAALGCLVKDYFPEPVTVSWNSGALTSGVHTFPAVL | |
| | QSSGLYSLSSVVTVPSSSLGTQTYICNVNHKPSNTKVDKKVEPKS | |
| | CHHHHHH | |

Constructs for binding to CD66b (CEACAM8)

| | | |
|---|---|---|
| E200 + CD66b | GHNYTTRNILPGLNITSDIQMTQSPSSLSASVGDRVTITCRASSSV | 293 |
| binder (nfP2X₇ | SYMHWYQQKPGKAPKPLIYATSNLASGVPSRFSGSGSGTDFTFTI | |
| epitope | SSLQPEDIATYYCQQWSSNPLTFGQGTKVEIKRTVAAPSVFIFPPS | |
| underlined), | DEQLKSGTASVVCLLNNFYPREAKVQWKVDNALQSGNSQESVT | |
| BW250-183, | EQDSKDSTYSLSSTLTLSKADYEKHKVYACEVTHQGLSSPVTKSF | |
| EP0585570A1, | NRGECHHHHHH | |
| B132-1_LC | | |
| CD66b, BW250- | QVQLQESGPGLVRPSQTLSLTCTVSGFSDYYMNWVRQPPGRGL | 294 |
| 183, | EWIGFISNKPNGHTTEYSASVKGRVTMLRDTSKNQFSLRLSSVTA | |
| EP0585570A1, | ADTAVYYCARDKGIRWYFDVWGQGSLVTVSSASTKGPSVFPLAP | |
| B132-2_HC | SSKSTSGGTAALGCLVKDYFPEPVTVSWNSGALTSGVHTFPAVL | |
| | QSSGLYSLSSVVTVPSSSLGTQTYICNVNHKPSNTKVDKKVEPKS | |
| | CHHHHHH | |

Constructs for binding to CD11b (MAC-1)

| | | |
|---|---|---|
| E200 + CD66b | GHNYTTRNILPGLNITSDIQMTQSPSSLSASLGERVSLTCRASQEI | 295 |
| binder (nfP2X₇ | SGYLSWHQQKPDGTIKRLLYSTSTLDSGVPKRFSGSRSGSDYSL | |
| epitope | TISSLESEDFADYYCLQYAISPPTFGGGTKLEIKRTVAAPSVFIFPP | |
| underlined), | SDEQLKSGTASVVCLLNNFYPREAKVQWKVDNALQSGNSQESV | |
| seq_1, | TEQDSKDSTYSLSSTLTLSKADYEKHKVYACEVTHQGLSSPVTKS | |
| WO2017220369A | FNRGECHHHHHH | |
| 1, B133-1_LC | | |
| CD11b, seq_1, | QVTLKESGPGILQTSQTLSLTCSFSGFSLSTSGMGVSWIRQPSGK | 296 |
| WO2017220369A | GLEWLAHIYWDDDKRYNPSLKSRLTISKDTSRNQVFLKITSVDTTD | |
| 1, B133-2_HC | TATYYCALNYYNSTYNFDFWGQGTTLTVSSASTKGPSVFPLAPS | |
| | SKSTSGGTAALGCLVKDYFPEPVTVSWNSGALTSGVHTFPAVLQ | |
| | SSGLYSLSSVVTVPSSSLGTQTYICNVNHKPSNTKVDKKVEPKSC | |
| | HHHHHH | |

Constructs for binding to EMR2 (ADGRE2)

| | | |
|---|---|---|
| E200 + EMR2 | GHNYTTRNILPGLNITSDIQMTQSPSSLSASVGDRVTITCKASQNV | 297 |
| binder (nfP2X₇ | RTTVDWYQQKPGKAPKLLIYLASNRHTGVPSRFSGSGSGTDFTL | |
| epitope | TISSLQPEDFATYYCLQHRNYPLTFGGGTKVEIKRTVAAPSVFIFP | |
| underlined), | PSDEQLKSGTASVVCLLNNFYPREAKVQWKVDNALQSGNSQES | |
| hSC93.253, | VTEQDSKDSTYSLSSTLTLSKADYEKHKVYACEVTHQGLSSPVTK | |
| WO2017087800A | SFNRGECHHHHHH | |
| 1, B134-1_LC | | |
| EMR2, | EVQLVESGGGLVKPGGSLRLSCAASGFTFSSYDMSWVRQAPGK | 298 |
| hSC93.253, | GLEWVSTISSGGNYNYYPDSVKGRFTISRDNAKNSLYLQMNSLR | |
| WO2017087800A | AEDTAVYYCARHYDYPDYAMDYWGQGTTVTVSSASTKGPSVFP | |
| 1, B134-2_HC | LAPSSKSTSGGTAALGCLVKDYFPEPVTVSWNSGALTSGVHTFP | |
| | AVLQSSGLYSLSSVVTVPSSSLGTQTYICNVNHKPSNTKVDKKVE | |
| | PKSCHHHHHH | |

Constructs for binding to MUC16

| | | |
|---|---|---|
| E200 + MUC16 | GHNYTTRNILPGLNITSDIVMTQAAPSVPVTPGESVSISCRSSKSL | 299 |
| binder (nfP2X₇ | LHSNGNTYLYWFLQRPGQSPQRLIYYMSNLASGVPDRFSGRGS | |
| epitope | GTDFTLRISRVEAEDVGVYYCMQSLEYPLTFGGGTKLEIKRTVAA | |
| underlined), | PSVFIFPPSDEQLKSGTASVVCLLNNFYPREAKVQWKVDNALQS | |
| 18C6, | GNSQESVTEQDSKDSTYSLSSTLTLSKADYEKHKVYACEVTHQG | |
| WO2016149368A | LSSPVTKSFNRGECHHHHHH | |
| 1, B135-1_LC | | |
| MUC16, 18C6, | QVTLKESGPGILQPSQTLSLTCSFSGFSLSTVGMGVGWSRQPSG | 300 |
| WO2016149368A | KGLEWLAHIWWDDEDKYYNPALKSRLTISKDTSKNQVFLKIANVD | |
| 1, B135-2_HC | TADTATYYCTRIGTAQATDALDYWGQGTSVTVSSASTKGPSVFPL | |
| | APSSKSTSGGTAALGCLVKDYFPEPVTVSWNSGALTSGVHTFPA | |
| | VLQSSGLYSLSSVVTVPSSSLGTQTYICNVNHKPSNTKVDKKVEP | |
| | KSCHHHHHH | |

Constructs for binding to NYESO-1 HLA-A2 (scTCR)

| | | |
|---|---|---|
| E200 + scTCR | GHNYTTRNILPGLNITSAQSVAQPEDLVNVAEGNPLTVKCTYSVS | 301 |
| NYESO-1v1 | GNPYLFWYVQYPNRGLQFLLKYLGDSALVKGSYGFEAEFNKSQT | |
| binder (nfP2X₇ | SFHLKKPSALVSDSALYFCAVRDINSGAGSYQLTFGKGTKLSVIPG | |
| epitope | GGGSGGGGSGGGGSSAVISQKPSRDIKQRGTSLTIQCQVDKRLA | |
| underlined), | LMFWYRQQPGQSPTLIATAWTGGEATYESGFVIDKFPISRPNLTF | |
| 18C6, | STLTVSNMSPEDSSIYLCSVGGSGAADTQYFGPGTRLTVLHHHH | |
| WO2017109496A | HH | |
| 1, B136-1_v1 | | |
| E200 + scTCR | HHHHHHAQSVAQPEDLVNVAEGNPLTVKCTYSVSGNPYLFWYV | 302 |
| NYESO-1v2 | QYPNRGLQFLLKYLGDSALVKGSYGFEAEFNKSQTSFHLKKPSAL | |
| binder (nfP2X₇ | VSDSALYFCAVRDINSGAGSYQLTFGKGTKLSVIPGGGGSGGGG | |
| epitope | SGGGGSSAVISQKPSRDIKQRGTSLTIQCQVDKRLALMFWYRQQ | |
| underlined), | PGQSPTLIATAWTGGEATYESGFVIDKFPISRPNLTFSTLTVSNMS | |
| WO2017109496A | PEDSSIYLCSVGGSGAADTQYFGPGTRLTVLGGGGSGHNYTTRN | |
| 1, B136-2_v2 | ILPGLNITS | |

Constructs for binding to SURVIVIN HLA-A2 (scTCR)

| | | |
|---|---|---|
| E200 + ScTCR | GHNYTTRNILPGLNITSSQTIHQWPATLVQPVGSPLSLECTVEGTS | 303 |
| SURVIVINv1 | NPNLYWYRQAAGRGLELLFYSVGIGQISSEVPQNLFASRPQDRQ | |
| binder (nfP2X₇ | FILSSKKLLLSDSGFYLCAWSIGAEQFFGPGTRLTVLEDLKNGSAD | |
| epitope | DAKKDAAKKDGKSGGGGSGGGGSGGGGSQKEVEQNSGPLSVP | |
| underlined), | EGAIASLNCTYSDRGSQSFFWYRQYSGKSPELIMSIYSNGDKED | |
| 18C6, NZ719707, | GRFTAQLNKASQYVSLLIRDSQPSDSATYLCAVSKGYKMFGDGT | |
| B137-1_v1 | QLVVKPNIHHHHHH | |
| E200 + scTCR | HHHHHHSQTIHQWPATLVQPVGSPLSLECTVEGTSNPNLYWYR | 304 |
| NYESO-1v2 | QAAGRGLELLFYSVGIGQISSEVPQNLFASRPQDRQFILSSKKLLL | |
| binder (nfP2X₇ | SDSGFYLCAWSIGAEQFFGPGTRLTVLEDLKNGSADDAKKDAAK | |
| epitope | KDGKSGGGGSGGGGSGGGGSQKEVEQNSGPLSVPEGAIASLN | |
| underlined), | CTYSDRGSQSFFWYRQYSGKSPELIMSIYSNGDKEDGRFTAQLN | |
| NZ719707, B137- | KASQYVSLLIRDSQPSDSATYLCAVSKGYKMFGDGTQLVVKPNIG | |
| 2_v2 | GGGSGHNYTTRNILPGLNITS | |

Constructs for biding to BCMA (ligand)

| | | |
|---|---|---|
| E200 + dAPRIL | GHNYTTRNILPGLNITSSVLHLVPINATSKDDSDVTEVMWQPALR | 305 |
| binder (nfP2X₇ | RGRGLQAQGYGVRIQDAGVYLLYSQVLFQDVTFTMGQVVSREG | |
| epitope | QGRQETLFRCIRSMPSHPDRAYNSCYSAGVFHLHQGDILSVIIPR | |
| underlined), | ARAKLNLSPHGTFLGFVKLSGGGSDPHHHHHH | |
| WO2015052538A | | |
| 1, B138-1_v1 | | |
| E200 + dAPRIL | HHHHHHSVLHLVPINATSKDDSDVTEVMWQPALRRGRGLQAQG | 306 |
| binder (nfP2X₇ | YGVRIQDAGVYLLYSQVLFQDVTFTMGQVVSREGQGRQETLFRC | |
| epitope | IRSMPSHPDRAYNSCYSAGVFHLHQGDILSVIIPRARAKLNLSPHG | |
| underlined), | TFLGFVKLSGGGSDPGHNYTTRNILPGLNITS | |
| WO2015052538A | | |
| 1, B139-2_v2 | | |

Constructs for binding to CD200

| | | |
|---|---|---|
| E200 + CD200, | QVQLQQSGSELKKPGASVKISCKASGYSFTDYIILWVRQNPGKGL | 307 |
| samalizumab, | EWIGHIDPYYGSSNYNLKFKGRVTITADQSTTTAYMELSSLRSED | |
| B140-1 | TAVYYCGRSKRDYFDYWGQGTTLTVSSASTKGPSVFPLAPSSKS | |
| | TSGGTAALGCLVKDYFPEPVTVSWNSGALTSGVHTFPAVLQSSG | |
| | LYSLSSVVTVPSSSLGTQTYICNVNHKPSNTKVDKKVEPKSCHHH | |
| | HHH | |
| CD200, LC, | DIQMTQSPSSLSASIGDRVTITCKASQDINSYLSWFQQKPGKAPK | 308 |
| samalizumab, | LLIYRANRLVDGVPSRFSGSGSGTDYTLTISSLQPEDFAVYYCLQY | |
| B140-2 | DEFPYTFGGGTKLEIKRTVAAPSVFIFPPSDEQLKSGTASVVCLLN | |
| | NFYPREAKVQWKVDNALQSGNSQESVTEQDSKDSTYSLSSTLTL | |
| | SKADYEKHKVYACEVTHQGLSSPVTKSFNRGECHHHHHH | |

Further examples of tumour-specific epitope
antigen moieties (including linker and hinge regions)

| | | |
|---|---|---|
| E200 + IgG hinge | GHNYTTRNILPGLNITSEPKSSDKTHT | 365 |
| (E200 underlined) | | |
| E200 + GS | GHNYTTRNILPGLNITSGSEPKSSDKTHT | 366 |
| linker_IgG hinge | | |
| E200 + G4S | GHNYTTRNILPGLNITSGGGGSEPKSSDKTHT | 367 |
| linker + IgG hinge | | |
| Extended E200 + | GHNYTTRNILPGLNITSTFHKTSGSGKEPKSSDKTHT | 368 |
| _IgG hinge | | |
| Extended E200 + | GHNYTTRNILPGLNITSTFHKTSGSGKGSEPKSSDKTHT | 369 |
| GS linker + _IgG | | |
| hinge | | |
| Extended E200 + | GHNYTTRNILPGLNITSTFHKTSGSGKGGGGSEPKSSDKTHT | 370 |
| G4S linker + IgG | | |
| hinge | | |
| E200 + IgG | GHNYTTRNILPGLNITSEPKSSDKTHTGS | 371 |
| hinge + GS linker | | |
| E200 + GS | GHNYTTRNILPGLNITSGSEPKSSDKTHTGS | 372 |
| linker + IgG | | |
| hinge + GS linker | | |
| E200 + G4Slinker + | GHNYTTRNILPGLNITSGGGGSEPKSSDKTHTGS | 373 |
| IgG hinge + GS | | |
| linker | | |
| Extended | GHNYTTRNILPGLNITSTFHKTSGSGKEPKSSDKTHTGS | 374 |
| E200 + _IgG | | |
| hinge + GSlinker | | |
| Extended | GHNYTTRNILPGLNITSTFHKTSGSGKGSEPKSSDKTHTGS | 375 |
| E200 + GS | | |
| linker + _IgG | | |
| hinge + GSlinker | | |
| Extended | GHNYTTRNILPGLNITSTFHKTSGSGKGGGGSEPKSSDKTHTGS | 376 |
| E200 + G4S | | |
| linker + _IgG | | |
| hinge + GSlinker | | |
| E200 + IgG | GHNYTTRNILPGLNITSEPKSSDKTHTGGGGS | 377 |
| hinge + G4S linker | | |
| E200 + GS | GHNYTTRNILPGLNITSGSEPKSSDKTHTGGGGS | 378 |
| linker + IgG | | |
| hinge + G4S linker | | |
| E200 + G4S | GHNYTTRNILPGLNITSGGGGSEPKSSDKTHTGGGGS | 379 |
| linker + IgG | | |
| hinge + G4S linker | | |
| Extended | GHNYTTRNILPGLNITSTFHKTSGSGKEPKSSDKTHTGGGGS | 380 |
| E200 + IgG | | |
| hinge + G4S linker | | |
| Extended | GHNYTTRNILPGLNITSTFHKTSGSGKGSEPKSSDKTHTGGGGS | 381 |
| E200 + GS | | |
| linker + IgG | | |
| hinge + G4S linker | | |
| Extended | GHNYTTRNILPGLNITSTFHKTSGSGKGGGGSEPKSSDKTHTGG | 382 |
| E200 + G4S | GGS | |
| linker + IgG | | |
| hinge + G4S linker | | |
| N-term extended | DFPGHNYTTRNILPGLNITSEPKSSDKTHT | 383 |
| E200 + IgG hinge | | |
| N-term extended | DFPGHNYTTRNILPGLNITSGSEPKSSDKTHT | 384 |
| E200 + GS | | |
| linker + IgG hinge | | |
| N-term extended | DFPGHNYTTRNILPGLNITSGGGGSEPKSSDKTHT | 385 |
| E200 + G4S | | |
| linker + IgG hinge | | |
| N and C term | DFPGHNYTTRNILPGLNITSTFHKTSGSGKEPKSSDKTHT | 386 |
| extended | | |
| E200 + IgG hinge | | |
| N and C term | DFPGHNYTTRNILPGLNITSTFHKTSGSGKGSEPKSSDKTHT | 387 |
| extended | | |
| E200 + GS | | |
| linker + IgG hinge | | |
| N and C term | DFPGHNYTTRNILPGLNITSTFHKTSGSGKGGGGSEPKSSDKTHT | 388 |
| extended E200 + | | |
| G4S linker + IgG | | |
| hinge | | |
| N-term extended | DFPGHNYTTRNILPGLNITSEPKSSDKTHTGS | 389 |
| E200 + IgG hinge + | | |
| GS linker | | |
| N-term extended | DFPGHNYTTRNILPGLNITSGSEPKSSDKTHTGS | 390 |
| E200 + GS | | |
| linker + IgG hinge + | | |
| GS linker | | |
| N-term extended | DFPGHNYTTRNILPGLNITSGGGGSEPKSSDKTHTGS | 391 |
| E200 + G4S | | |
| linker + IgG hinge + | | |
| GS linker | | |
| N-term and C | DFPGHNYTTRNILPGLNITSTFHKTSGSGKEPKSSDKTHTGS | 392 |
| term extended | | |
| E200 + IgG | | |
| hinge + GS linker | | |
| N-term and C | DFPGHNYTTRNILPGLNITSTFHKTSGSGKGSEPKSSDKTHTGS | 393 |
| term extended | | |
| E200 + GS linker + | | |
| IgG hinge + GS | | |
| linker | | |
| N-term and C | DFPGHNYTTRNILPGLNITSTFHKTSGSGKGGGGSEPKSSDKTHT | 394 |
| term extended | GS | |
| E200 + G4S | | |
| linker + IgG | | |
| hinge + GS linker | | |
| N-term extended | DFPGHNYTTRNILPGLNITSEPKSSDKTHTGGGGS | 395 |
| E200 + IgG hinge | | |
| + G4S linker | | |
| N-term extended | DFPGHNYTTRNILPGLNITSGSEPKSSDKTHTGGGGS | 396 |
| E200 + GS | | |
| linker + IgG hinge | | |
| + G4S linker | | |
| N-term extended | DFPGHNYTTRNILPGLNITSGGGGSEPKSSDKTHTGGGGS | 397 |
| E200 + G4S | | |
| linker + IgG hinge | | |
| + G4S linker | | |
| N-term and C | DFPGHNYTTRNILPGLNITSTFHKTSGSGKEPKSSDKTHTGGGGS | 398 |
| term extended | | |
| E200 + IgG | | |
| hinge + G4S linker | | |
| N-term and C | DFPGHNYTTRNILPGLNITSTFHKTSGSGKGSEPKSSDKTHTGGG | 399 |
| term extended | GS | |
| E200 + GS linker + | | |
| IgG hinge + G4S | | |
| linker | | |
| N-term and C | DFPGHNYTTRNILPGLNITSTFHKTSGSGKGGGGSEPKSSDKTHT | 400 |
| term extended | GGGGS | |
| E200 + G4S | | |
| linker + IgG | | |
| hinge + G4S linker | | |

### DETAILED DESCRIPTION OF THE EMBODIMENTS

[0133] Reference will now be made in detail to certain embodiments of the invention. While the invention will be described in conjunction with the embodiments, it will be understood that the intention is not to limit the invention to those embodiments. On the contrary, the invention is intended to cover all alternatives, modifications, and equivalents, which may be included within the scope of the present invention as defined by the claims.

[0134] One skilled in the art will recognise many methods and materials similar or equivalent to those described herein, which could be used in the practice of the present invention. The present invention is in no way limited to the methods and materials described.

[0135] It will be understood that the invention disclosed and defined in this specification extends to all alternative combinations of two or more of the individual features mentioned or evident from the text or drawings. All of these different combinations constitute various alternative aspects of the invention.

[0136] All of the patents and publications referred to herein are incorporated by reference in their entirety.

[0137] The present invention seeks to address one or more of the deficiencies of the prior art and is based on the recognition by the inventors that it is possible to exploit the cancer-specific expression of tumour-specific antigens, such as a dysfunctional P2X₇ receptor, to:
[0138] a) expand the targets of immune cells expressing chimeric antigen receptors (CARs) which bind to a tumour-specific antigen, such as a dysfunctional P2X₇ receptor; and/or
[0139] b) provide a tunable, “switchable” approach to targeted cell killing in a variety of settings that minimise on-target, off-tumour effects; and
[0140] c) minimise aberrant immune responses to adaptor molecules.

[0141] The invention provides a new treatment modality comprising a first component and second component. The first component is the administration of an immune cell that comprises a CAR that binds to a dysfunctional P2X₇ receptor expressed on a cell surface (also referred to herein as “nfP2X-directed CAR”). The second component is the administration (or expression) of a bridging molecule that can redirect tumour-specific CARs (eg nfP2X₇-directed CARs) to other cell surface molecules, such as cancer-associated antigens, e.g. CD19, CD20, CD33, GD2, intracellularly processed proteins that are presented as peptides of various length via MHC I and II or via any other mechanism of accessible surface antigen exposure.

[0142] The targeted cell surface molecules may be associated with cancer (such as tumour associated antigens expressed on the surface of cancer cells). In further embodiments, the targeted cell surface molecules may be associated with an infection, or associated with any other disease (including autoimmune diseases). In such embodiments, the molecules may be cell surface antigens associated with the disease or may include peptide/HLA complexes presented on cells. In certain examples the molecule may comprise CD19 in B-lineage malignancy. The molecule may comprise targeted peptides related to cancer-specific proteins (genetic aberrations such as cancer testis antigens and others which are specific to the cancer patient). The molecule may be a peptide/HLA complex comprising peptides derived from an infectious agent e.g. of viral, bacterial, protozoan, virion, prion and fungal origin. The molecule may be a peptide/HLA complex comprising peptides associated with an autoimmune disease (e.g., Sm peptides associated with lupus).

[0143] Further, the present invention provides several advantages over existing “adaptor CAR” approaches. In more detail, adaptor CAR T cell technology is based on an approach to uncoupling the tumour-targeting and signalling moieties of conventional CARs, resulting in dichotomous systems consisting of an adaptor CAR and soluble, tumour-specific adaptor molecules. The basic structure of adaptor CARs corresponds to the conventional CAR design, although the extracellular domain does not interact with the tumour-associated antigen, but instead with a binding partner incorporated into the adaptor molecule. The bifunctional adaptor molecule in turn provides target cell (tumour cell) specificity and acts as a linker at the interface between the tumour and the adaptor CAR T cell. This complex can then mediate anti-tumour responses, similarly to conventional CAR T cells.

[0144] While the dual principle of the adaptor CAR systems provides an important molecular safety switch to precisely control the adaptor CAR T cell activity, several limitations have been identified with the systems developed to date.

[0145] For example, one system relies on scFv-based a-FITC CARs targeting the synthetic dye FITC that is coupled to various tumour-specific adaptor molecules. Despite the full humanisation of the a-FITC CAR T cell product, the immunogenic potential of FITC is one concern for clinical translation, as underlined by the emergence of anti-a-FITC antibodies in therapeutic mouse models.

[0146] In another example, adaptor molecules include small peptide tags to redirect standard scFv-based adaptor CARs. However, concerns again have been raised with respect to the immunogenic potential of the small peptide tags included in the adaptor molecules, particularly in the case where the tag comprises non-human sequences, or sequences derived from human nuclear proteins.

[0147] In contrast to the approaches of the prior art, the present invention takes advantage of both the specificity of CARs that bind dysfunctional P2X₇ and of the unique properties of epitopes derived from dysfunctional P2X₇ receptor.

[0148] The present invention provides an advantage over existing mono-antigen directed CAR T therapy in that it:
[0149] makes use of CAR T cells that are functional (i.e., there is no requirement for the use of a switching molecule to activate the CAR T cells);
[0150] utilises CAR T cells that do not bind to healthy cells since dysfunctional P2X₇ receptor is only exposed on the surface of cancer cells;
   [0151] this means that there is no requirement for the administration of immunosuppressing agents;
   [0152] this also means that there is a significant reduction in the side-effects as compared to other approaches that include the use of CARs that bind antigens also found on non-cancerous cells;
[0153] comprises non-immunogenic, and naturally occurring human epitopes on the bridging molecule in the form of epitopes derived from dysfunctional P2X₇ receptor.

[0154] Thus the present invention provides a new concept and approach in the use of adaptor/bridging molecules alongside CAR T therapy.

[0155] In more detail, the specificity of CARs that bind dysfunctional nfP2X₇ receptor (also referred to herein as nfP2X₇ CAR) results from the fact that dysfunctional P2X₇ is only exposed on the surface of transformed cells. Further, by including an epitope from nfP2X₇ in a bridging molecule, CAR-mediated recognition can be broadened to include any target antigen of interest via the corresponding bridging molecule. The nfP2X₇ CAR solely recognises the dysfunctional P2X₇ receptor, e.g. the E200 (or E300 or E200-300 composite) epitope, however the use of a bridging molecule facilitates unlimited targeting by means of any accessible recognition site expressed on the cell surface, e.g. an nfP2X₇ CAR can be additionally directed (or redirected) to bind to CD19 positive cells through the use of a bridging molecule that comprises a targeting moiety for binding CD19 on a cell surface, and an E200 epitope from nfP2X₇.

[0156] P2X₇ is a human receptor protein that is commonly expressed in human tissue, particularly immune and neural cells. There is no reported or registered case of autoimmune response raised against P2X₇ receptors. Exemplary targeted epitopes such as E200, E300 and E200/E300 are not genetically defined but only result from a conformational change of the tertiary structure of P2X₇. Thus, these are non-immunogenic peptide sequences that are an unaltered part of the P2X₇ sequence. Only under artificial conditions using adjuvants and conjugates can immune responses be produced against the target.

[0157] An advantage of the non-immunogenic recognition sites, e.g. the peptide sequence of E200 or E300 or the composite peptide E200-300, in the bridging molecule facilitates long-term application of bridging molecules with various specificities without induction of neutralising antibodies and/or T cell mediated rejection of cells. This represents a significant advantage over the design of bridging/adaptor molecules described in the prior art.

[0158] Moreover, nfP2X₇ CARs only target cancer tissue specifically, and therefore the approach of the present invention presents minimal risk of “on-target, off-tumour” effects and damage to healthy tissue through off-target binding of the CARs. The present invention therefore exploits the specificity of nfP2X₇ CARs in two ways: firstly by relying on the fact that nfP2X₇ CARs only target nfP2X₇ expressing cells (cancer cells only) and secondly, by relying on the fact that bridging molecules, engineered to be bound by nfP2X₇ can be used to redirect immune cells expressing nfP2X₇ CARs towards other tumour-associated and/or specific target antigens in a switchable, tuneable manner.

[0159] Thus, the use of the bridging molecules of the invention allows for the redirection of immune cells expressing nfP2X₇ CARs for the targeting of any surface expressed target antigen.

[0160] A particular advantage of the present approach is that the targeting is limited to the time period during which the bridging molecule therapeutic in vivo is persistent in circulation. This means that any toxicity arising from the “on-target, off-tumour” expression of the target antigen in healthy tissue is minimised. This is because once the bridging molecule has been cleared from the body, nfP2X₇ CAR cells are again only capable of tumour-specifically targeting nfP2X₇. In other words, as the targeting of target antigens other than nfP2X₇ is bridging molecule-dependent, the targeting can be regulated by the application of bridging molecules. This facilitates an easy to implement approach for “switching-on” and “switching-off” the targeting of cancer cells via the antigen bound by the targeting moiety of the bridging molecules such that the CAR T cells may be transiently directed to cancer cells via antigens other than nfP2X₇. Further, the length of time during which the CAR T cells are redirected to other cancer antigens can be modulated by the time for which the bridging molecules are administered to a patient in need.

[0161] It should therefore be clear that the present invention finds application in a variety of settings. For example, in the context of oncology treatment, the present invention allows for the use of a single class of CAR molecule (i.e., for binding dysfunctional P2X₇ receptor present on cancer cells), to target multiple antigens present on the cancer cells. More specifically, using a bridging molecule that comprises a targeting moiety for binding CD19, the CAR-T cells can be targeted to the cancer cells at both dysfunctional P2X₇ receptor and CD19. This maximises the likelihood of the cancer cell being killed because it is being targeted at multiple sites. Moreover, it should be evident that the use of multiple bridging molecules, or bridging molecules comprising more than one targeting moiety, facilitates the “painting” of the cancer cell surface with CAR T cells. In other words, the invention provides for the use of a variety of different bridging molecules, each comprising epitopes for being bound by a single species of CAR T cell, but comprising different targeting moieties such that the CAR T cells may be directed to bind to cancer cells via multiple cancer antigens. In this way, the cancer cells can be targeted and bound by the CAR T cell at multiple sites, increasing the efficacy of cell killing.

[0162] This approach is also particularly useful in the case of cancers that express low levels of dysfunctional P2X₇ receptor, such as Burkitt's lymphoma or subcategories of solid tumours arising from various epithelial, mesenchymal, neural or germinal origins. Another example of a low-expressing cancer cell type may be the triple negative breast cancer (e.g. MDA-MB-231 cell line). Other examples include solid tumour tissues tested in tissue arrays from PDX models, several of which show lower receptor expression than other cancers. Such examples include but are not limited to neuroblastoma, colorectal cancer, lung cancer, breast cancer or brain cancer.

[0163] In further examples, the invention finds application in the context of preventing or minimising the severity of an infection with a pathogen (preferably an intracellular pathogen). While not limited to an oncology setting, this may be particularly useful in the treatment of patients receiving cancer therapy and who are immunocompromised (and therefore susceptible to infection with opportunistic or other pathogens). Thus, a patient who has received (or is continuing to receive) a treatment with CAR T cells that bind dysfunctional P2X₇ receptor, can simultaneously be administered a bridging molecule that facilitates the redirection of the CAR T cells to cells that present peptides from an infectious agent on MHC molecules on their cell surface. In other words, the invention provides a platform for simultaneous or sequential treatment of cancer and an infectious disease.

[0164] The basic principle as well as the engagement of nfPX₇ CAR expressing effector cells via nfP2X₇ E200-derived peptide tagged bridging molecules and the different formats of bridging molecules, is illustrated and outlined in FIGS. 1 to 3.

[0165] Using nfP2X₇R CAR without the presence of bridging molecules, the nfP2X₇ CAR expressing effector cells exhibit cancer-specific targeting (scenario I, see FIG. 11).

[0166] In order to broaden the applicability to nfP2X₇ functionally negative cancers (very low or negative for nfP2X₇) nfP2X₇ CAR expressing effector cells may be redirected to cancer cells via bridging molecules targeting cancer-associated antigens as illustrated for CD33 or cancer-specific antigens via TcR-like mAbs. The specificity of the bridging molecules is unlimited meaning any surface expressed target antigen or presented antigen in the context of MHC peptide presentation (class I and II) via TcR-like mAb or ligands may engage the nfP2X₇ CAR expressing effector cells in the same mode of action (scenario II. See FIG. 11).

[0167] In most cases, the dual-function of the nfP2X₇ CAR expressing effector cells is utilised (scenario 111, see FIG. 11). It is a combination of scenario 1, and II, which means that nfP2X₇ CAR expressing effector cells are engaged directly to cancer cells via nfP2X₇ expressed on the cancer cells and additionally recruited to the cancer cells via bridging molecules targeting cancer-associated antigens as illustrated for CD33 or cancer-specific antigens via TcR-like mAbs.

### Definitions

[0168] Unless defined otherwise, technical and scientific terms used herein have the same meaning as commonly understood by one of ordinary skill in the art to which this invention belongs.

[0169] For purposes of interpreting this specification, the following definitions will generally apply and whenever appropriate, terms used in the singular will also include the plural and vice versa.

[0170] “Purinergic receptor” generally refers to a receptor that uses a purine (such as ATP) as a ligand.

[0171] “P2X₇ receptor” generally refers to a purinergic receptor formed from three protein subunits or monomers, with at least one of the monomers having an amino acid sequence substantially as shown in SEQ ID NO: 1 below:

SEQ ID NO: 1
MPACCSCSDVFQYETNKVTRIQSMNYGTIKWFFHVIIFSYVCFALVSDKLYQRKEPVIS
SVHTKVKGIAEVKEEIVENGVKKLVHSVFDTADYTFPLQGNSFFVMTNFLKTEGQEQRL
CPEYPTRRTLCSSDRGCKKGWMDPQSKGIQTGRCVVYEGNQKTCEVSAWCPIEAVE
EAPRPALLNSAENFTVLIKNNIDFPGHNYTTRNILPGLNITCTFHKTQNPQCPIFRLGDIF
RETGDNFSDVAIQGGIMGIEIYWDCNLDRWFHHCRPKYSFRRLDDKTTNVSLYPGYNF
RYAKYYKENNVEKRTLIKVFGIRFDILVFGTGGKFDIIQLVVYIGSTLSYFGLAAVFIDFL
IDTYSSNCCRSHIYPWCKCCQPCVVNEYYYRKKCESIVEPKPTLKYVSFVDESHIRMVNQ
QLLGRSLQDVKGQEVPRPAMDFTDLSRLPLALHDTPPIPGQPEEIQLLRKEATPRSRD
SPVWCQCGSCLPSQLPESHRCLEELCCRKKPGACITTSELFRKLVLSRHVLQFLLLYQ
EPLLALDVDSTNSRLRHCAYRCYATWRFGSQDMADFAILPSCCRWRIRKEFPKSEGQ
YSGFKSPY

[0172] To the extent that P2X₇ receptor is formed from three monomers, it is a “trimer” or “trimeric”. “P2X₇ receptor” encompasses naturally occurring variants of P2X₇ receptor, e.g., wherein the P2X₇ monomers are splice variants, allelic variants, SNPs and isoforms including naturally-occurring truncated or secreted forms of the monomers forming the P2X₇ receptor (e.g., a form consisting of the extracellular domain sequence or truncated form of it), naturally-occurring variant forms (e.g., alternatively spliced forms) and naturally-occurring allelic variants. In certain embodiments of the invention, the native sequence P2X₇ monomeric polypeptides disclosed herein are mature or full-length native sequence polypeptides comprising the full-length amino acids sequence shown in SEQ ID NO: 1. In certain embodiments the P2X₇ receptor may have an amino acid sequence that is modified, for example various of the amino acids in the sequence shown in SEQ ID NO: 1 may be substituted, deleted, or a residue may be inserted.

[0173] “Functional P2X₇ receptor” generally refers to a form of the P2X₇ receptor having three intact binding sites or clefts for binding to ATP. When bound to ATP, the functional receptor forms a non-selective sodium/calcium channel that converts to a pore-like structure that enables the ingress of calcium ions and molecules of up to 900 Da into the cytosol, one consequence of which may be induction of programmed cell death. In normal homeostasis, expression of functional P2X₇ receptors is generally limited to cells that undergo programmed cell death such as thymocytes, dendritic cells, lymphocytes, macrophages and monocytes. There may also be some expression of functional P2X₇ receptors on erythrocytes and other cell types.

[0174] “Dysfunctional P2X₇ receptor” generally refers to a form of a P2X₇ receptor having a conformation, distinct from functional P2X₇, whereby the receptor is unable to form an apoptotic pore, but which is still able to operate as a non-selective channel through the maintenance of a single functional ATP binding site located between adjacent monomers. One example arises where one or more of the monomers has a cis isomerisation at Pro210 (according to SEQ ID NO: 1). The isomerisation may arise from any molecular event that leads to misfolding of the monomer, including for example, mutation of monomer primary sequence or abnormal post translational processing. One consequence of the isomerisation is that the receptor is unable to bind to ATP at one, or more particularly two, ATP binding sites on the trimer and as a consequence not be able to extend the opening of the channel. In the circumstances, the receptor cannot form a pore and this limits the extent to which calcium ions may enter the cytosol. Dysfunctional P2X₇ receptors are expressed on a wide range of epithelial and haematopoietic cancers. As used herein, the term “dysfunctional P2X₇ receptors” may be used interchangeably with the term “non-functional P2X₇ receptors” or “nfP2X₇ receptors”.

[0175] “Cancer associated-P2X₇ receptors” are generally P2X₇ receptors that are found on cancer cells (including, pre-neoplastic, neoplastic, malignant, benign or metastatic cells), but not on non-cancer or normal cells.

[0176] “E200 epitope” generally refers to an epitope having the sequence GHNYTTNILPGLNITC and variants thereof (e.g. SEQ ID NOs: 2-11, 15-30 and 168).

[0177] “E300 epitope” generally refers to an epitope having the sequence KYYKENNVEKRTLIK and variants thereof (SEQ ID NOs: 12 and 13).

[0178] A “composite epitope” generally refers to an epitope that is formed from the juxtaposition of the E200 and E300 epitopes or parts of these epitopes. An example of a composite epitope comprising E200 and E300 epitopes is GHNYTTRNILPGAGAKYYKENNVEK (SEQ ID NO: 14).

[0179] “Antibodies” or “immunoglobulins” or “Igs” are gamma globulin proteins that are found in blood, or other bodily fluids of vertebrates that function in the immune system to bind antigen, hence identifying and/or neutralising foreign objects.

[0180] Antibodies are generally a heterotetrameric glycoprotein composed of two identical light (L) chains and two identical heavy (H) chains. Each L chain is linked to a H chain by one covalent disulfide bond. The two H chains are linked to each other by one or more disulfide bonds depending on the H chain isotype. Each H and L chain also has regularly spaced intrachain disulfide bridges.

[0181] H and L chains define specific Ig domains. More particularly, each H chain has at the N-terminus, a variable domain (V_{H}) followed by three constant domains (CH) for each of the α and γ chains and four CH domains for p and E isotypes. Each L chain has at the N-terminus, a variable domain (V_{L}) followed by a constant domain (CL) at its other end. The V_{L} is aligned with the V_{H} and the C_{L} is aligned with the first constant domain of the heavy chain (CH1).

[0182] Antibodies can be assigned to different classes or isotypes. There are five classes of immunoglobulins: IgA, IgD, IgE, IgG, and IgM, having heavy chains designated α, δ, ε, γ, and μ, respectively. The γ and α classes are further divided into subclasses on the basis of relatively minor differences in ¾ sequence and function, e.g., humans express the following subclasses: IgG1, IgG2, IgG3, IgG4, IgA1, and IgA2. The L chain from any vertebrate species can be assigned to one of two clearly distinct types, called kappa and lambda, based on the amino acid sequences of their constant domains.

[0183] The constant domain includes the Fc portion that comprises the carboxy-terminal portions of both H chains held together by disulfides. The effector functions of antibodies such as ADCC are determined by sequences in the Fc region, which region is also the part recognised by Fc receptors (FcR) found on certain types of cells.

[0184] The pairing of a V_{H} and V_{L} together forms a “variable region” or “variable domain” including the amino-terminal domains of the heavy or light chain of the antibody. The variable domain of the heavy chain may be referred to as “V_{H}.” The variable domain of the light chain may be referred to as “V_{L}.” The V domain contains an “antigen binding site” that affects antigen binding and defines specificity of a particular antibody for its particular antigen. V regions span about 110 amino acid residues and consist of relatively invariant stretches called framework regions (FRs) (generally about 4) of 15-30 amino acids separated by shorter regions of extreme variability called “hypervariable regions” (generally about 3) that are each generally 9-12 amino acids long. The FRs largely adopt a β-sheet configuration and the hypervariable regions form loops connecting, and in some cases forming part of, the β-sheet structure.

[0185] “Hypervariable region” refers to the regions of an antibody variable domain that are hypervariable in sequence and/or form structurally defined loops. Generally, antibodies comprise six hypervariable regions; three in the V_{H} (H1, H2, H3), and three in the V_{L} (L1, L2, L3).

[0186] “Framework” or “FR” residues are those variable domain residues other than the hypervariable region residues herein defined.

[0187] An “antigen binding site” generally refers to a molecule that includes at least the hypervariable and framework regions that are required for imparting antigen binding function to a V domain. An antigen binding site may be in the form of an antibody or an antibody fragment, (such as a mAb, single domain (SD)-mAb, dAb, Fab, SD-Fab, Fd, SD-Fv, Fv, F(ab′)2 or scFv) in a method described herein.

[0188] An “intact” or “whole” antibody is one that comprises an antigen-binding site as well as a C_{L} and at least heavy chain constant domains, CH1, CH2 and CH3. The constant domains may be native sequence constant domains (e.g. human native sequence constant domains) or amino acid sequence variant thereof. [014]“Whole antibody fragments including a variable domain” include SD-mAb, Fab, Fab′, F(ab′)2, and Fv fragments; diabodies; linear antibodies, single-chain antibody molecules; and multi-specific antibodies formed from antibody fragments.

[0189] The “Fab fragment” consists of an entire L chain along with the variable region domain of the H chain (V_{H}), and the first constant domain of one heavy chain (CH1). Each Fab fragment is monovalent with respect to antigen binding, i.e., it has a single antigen-binding site.

[0190] A “Fab′ fragment” differs from Fab fragments by having additional few residues at the carboxy terminus of the CH1 domain including one or more cysteines from the antibody hinge region. Fab′-SH is the designation herein for Fab′ in which the cysteine residue(s) of the constant domains bear a free thiol group.

[0191] A “F(ab′)2 fragment” roughly corresponds to two disulphide linked Fab fragments having divalent antigen-binding activity and is still capable of cross-linking antigen.

[0192] An “Fv” is the minimum antibody fragment that contains a complete antigen-recognition and binding site. This fragment consists of a dimer of one heavy and one light chain variable region domain in tight, non-covalent association.

[0193] In a single-chain Fv (scFv) species, one heavy and one light chain variable domain can be covalently linked by a flexible peptide linker such that the light and heavy chains can associate in a “dimeric” structure analogous to that in a two-chain Fv species. From the folding of these two domains emanate six hypervariable loops (3 loops each from the H and L chain) that contribute the amino acid residues for antigen binding and confer antigen binding specificity to the antibody.

[0194] “Single-chain Fv” also abbreviated as “sFv” or “scFv” are antibody fragments that comprise the V_{H} and V_{L} antibody domains connected to form a single polypeptide chain. Preferably, the scFv polypeptide further comprises a polypeptide linker between the V_{H} and V_{L} domains that enables the scFv to form the desired structure for antigen binding.

[0195] A “single variable domain” is half of an Fv (comprising only three CDRs specific for an antigen) that has the ability to recognise and bind antigen, although generally at a lower affinity than the entire binding site.

[0196] “Diabodies” refers to antibody fragments with two antigen-binding sites, which fragments comprise a heavy-chain variable domain (V_{H}) connected to a light-chain variable domain (V_{L}) in the same polypeptide chain (V_{H}-V_{L}). The small antibody fragments are prepared by constructing sFv fragments (see preceding paragraph) with short linkers (about 5-10 residues) between the V_{H} and V_{L} domains such that interchain but not intra-chain pairing of the V domains is achieved, resulting in a bivalent fragment, i.e., a fragment having two antigen-binding sites.

[0197] Diabodies may be bivalent or bispecific. Bispecific diabodies are heterodimers of two “crossover” sFv fragments in which the V_{H} and V_{L} domains of the two antibodies are present on different polypeptide chains. Triabodies and tetrabodies are also generally known in the art.

[0198] An “isolated antibody” is one that has been identified and separated and/or recovered from a component of its pre-existing environment. Contaminant components are materials that would interfere with therapeutic uses for the antibody, and may include enzymes, hormones, and other proteinaceous or non-proteinaceous solutes.

[0199] A “human antibody” refers to an antibody that possesses an amino acid sequence that corresponds to that of an antibody produced by a human. Human antibodies can be produced using various techniques known in the art, including phage-display libraries. Human antibodies can be prepared by administering the antigen to a transgenic animal that has been modified to produce such antibodies in response to antigenic challenge, but whose endogenous loci have been disabled.

[0200] “Humanised” forms of non-human (e.g., rodent) antibodies are chimeric antibodies that contain minimal sequence derived from the non-human antibody. For the most part, humanised antibodies are human immunoglobulins (recipient antibody) in which residues from a hypervariable region of the recipient are replaced by residues from a hypervariable region of a non-human species (donor antibody) such as mouse, rat, rabbit or non-human primate having the desired antibody specificity, affinity, and capability. In some instances, framework region (FR) residues of the human immunoglobulin are replaced by corresponding non-human residues. Furthermore, humanised antibodies may comprise residues that are not found in the recipient antibody or in the donor antibody. These modifications are made to further refine antibody performance. In general, the humanised antibody will comprise substantially all of at least one, and typically two, variable domains, in which all or substantially all of the hypervariable loops correspond to those of a non-human immunoglobulin and all or substantially all of the FRs are those of a human immunoglobulin sequence. The humanised antibody optionally also will comprise at least a portion of an immunoglobulin constant region (Fc), typically that of a human immunoglobulin.

[0201] “Monoclonal antibody” refers to an antibody obtained from a population of substantially homogeneous antibodies, i.e., the individual antibodies comprising the population are identical except for possible naturally occurring mutations that may be present in minor amounts. Monoclonal antibodies are highly specific, being directed against a single antigenic site or determinant on the antigen. In addition to their specificity, the monoclonal antibodies are advantageous in that they may be synthesised uncontaminated by other antibodies. Monoclonal antibodies may be prepared by the hybridoma methodology. The “monoclonal antibodies” may also be isolated from phage antibody libraries using molecular engineering techniques.

[0202] The term “anti-P2X₇ receptor antibody” or “an antibody that binds to P2X₇ receptor” refers to an antibody that is capable of binding P2X₇ receptor with sufficient affinity such that the antibody is useful as a diagnostic and/or therapeutic agent in targeting P2X₇ receptor, typically non-functional P2X₇ receptor or a cancer associated P2X₇ receptor. Preferably, the extent of binding of a P2X₇ receptor antibody to an unrelated protein is less than about 10% of the binding of the antibody to P2X₇ receptor as measured, e.g., by a radioimmunoassay (RIA), Enzyme-Linked Immunosorbent Assay (ELISA), Biacore or Flow Cytometry. In certain embodiments, an antibody that binds to P2X₇ receptor has a dissociation constant (Kd) of <1 μM, <100 nM, <10 nM, <1 nM, or <0.1 nM. An anti nfP2X₇ receptor antibody is generally one having some or all of these serological characteristics and that binds to dysfunctional P2X₇ receptors but not to functional P2X₇ receptors.

[0203] An “affinity matured” antibody is one with one or more alterations in one or more hypervariable regions thereof that result in an improvement in the affinity of the antibody for the antigen, compared to a parent antibody that does not possess those alteration(s). Preferred affinity matured antibodies will have nanomolar or even picomolar affinities for the target antigen. Affinity matured antibodies are produced by procedures known in the art.

[0204] A “blocking” “antibody” or an “antagonist” antibody is one that inhibits or reduces biological activity of the antigen it binds. Preferred blocking antibodies or antagonist antibodies substantially or completely inhibit the biological activity of the antigen.

[0205] An “agonist antibody”, as used herein, is an antibody, which mimics at least one of the functional activities of a polypeptide of interest.

[0206] “Binding affinity” generally refers to the strength of the sum total of non-covalent interactions between a single binding site of a molecule (e.g., an antibody) and its binding partner (e.g., an antigen). Unless indicated otherwise, as used herein, “binding affinity” refers to intrinsic binding affinity, which reflects a 1:1 interaction between members of a binding pair (e.g., antibody and antigen). The affinity of a molecule X for its partner Y can generally be represented by the dissociation constant (Kd). Affinity can be measured by common methods known in the art, including those described herein. Low-affinity antibodies generally bind antigen slowly and tend to dissociate readily, whereas high-affinity antibodies generally bind antigen faster and tend to remain bound longer. A variety of methods of measuring binding affinity are known in the art, any of which can be used for purposes of the present invention.

[0207] As used herein, the term “antigen” is intended to include substances that bind to or evoke the production of one or more antibodies and may comprise, but is not limited to, proteins, peptides, polypeptides, oligopeptides, lipids, carbohydrates, and combinations thereof, for example a glycosylated protein or a glycolipid. The term “antigen” as used herein refers to a molecular entity that may be expressed on a target cell and that can be recognised by means of the adaptive immune system including but not restricted to antibodies or TCRs, or engineered molecules including but not restricted to transgenic TCRs, CARs, scFvs or multimers thereof, Fab-fragments or multimers thereof, antibodies or multimers thereof, single chain antibodies or multimers thereof, or any other molecule that can execute binding to a structure with high affinity.

[0208] “Epitope” generally refers to that part of an antigen that is bound by the antigen binding site of an antibody. An epitope may be “linear” in the sense that the hypervariable loops of the antibody CDRs that form the antigen binding site bind to a sequence of amino acids as in a primary protein structure. In certain embodiments, the epitope is a “conformational epitope” i.e. one in which the hypervariable loops of the CDRs bind to residues as they are presented in the tertiary or quaternary protein structure.

[0209] The term “target cell” as used herein refers to a cell that expresses a dysfunctional P2X₇ receptor (e.g. nfP2X₇ receptor) or a cell surface molecule to which the targeting moiety of the bridging molecule binds. The target cell may be a cancer cell or any other diseased cell.

[0210] The term “disorder” or “condition” means a functional abnormality or disturbance in a subject such as a cancer, an autoimmune disorder, or an infection by virus, bacteria, parasite, or others.

[0211] For example, a nucleic acid or a peptide naturally present in a living animal is not “isolated”, but the same nucleic acid or peptide partially or completely separated from the coexisting materials of its natural state is “isolated”. An isolated nucleic acid or protein can also exist in a non-native environment such as, for example, in a host cell.

[0212] As used herein, the term “subject” refers to a mammal such as mouse, rat, cow, pig, goat, chicken, dog, monkey or human. Preferentially, the subject is a human.

[0213] The subject may be a subject suffering from a disorder such as cancer (a patient), but the subject also may be a healthy subject.

[0214] The term “autologous” as used herein refers to any material derived from the same subject to whom it is later re-introduced.

[0215] The term “allogeneic” as used herein refers to any material derived from a different subject of the same species as the subject to whom the material is re-introduced.

[0216] The terms “therapeutically effective amount” or “therapeutically effective population” mean an amount of, for example, a cell population that provides a therapeutic benefit in a subject.

[0217] The terms “binds to”, “specifically binds to” or “specific for” with respect to a targeting moiety, as used e.g. in the bridging molecule as disclosed herein, or of a CAR referring to an antigen-binding domain that recognises and binds to a specific antigen, does not substantially recognise or bind to other molecules in a sample. An antigen-binding domain or targeting moiety that binds specifically to an antigen from one species also may bind to that antigen from another species. This cross-species reactivity is typical of many antibodies and therefore not contrary to the definition that the antigen-binding domain is specific. An antigen-binding domain that specifically binds to an antigen may bind also to different allelic forms of the antigen (allelic variants, splice variants, isoforms etc.) or homologous variants of this antigen from the same gene family. This cross reactivity is typical of many antibodies and therefore not contrary to the definition that the antigen-binding domain is specific.

[0218] The terms “engineered cell” and “genetically modified cell” as used herein can be used interchangeably. The terms mean containing and/or expressing a foreign gene or nucleic acid sequence that in turn modifies the genotype or phenotype of the cell or its progeny. Especially, the terms refer to the fact that cells, preferentially immune cells, can be manipulated by recombinant methods well known in the art to express stably or transiently peptides or proteins that are not expressed in these cells in the natural state. For example, immune cells are engineered to express an artificial construct such as a chimeric antigen receptor on their cell surface. For example, the CAR sequences may be delivered into cells using an adenoviral, adeno-associated viral (AAV)-based, retroviral or lentiviral vector or any other pseudotyped variations thereof or any other gene delivery mechanism such as electroporation or lipofection with CRISPR/Cas9, transposons (e.g. sleeping-beauty) or variations thereof. The gene delivery may be in the form of mRNA (transient) or DNA (transient or permanent).

[0219] The terms “immune cell” or “immune effector cell” refer to a cell that may be part of the immune system and executes a particular effector function such as alpha-beta T cells, NK cells, NKT cells, B cells, Breg cells, Treg cells, innate lymphoid cells (ILC), cytokine induced killer (CIK) cells, lymphokine activated killer (LAK) cells, gamma-delta T cells, mesenchymal stem cells or mesenchymal stromal cells (MSC), monocytes or macrophages or any hematopoietic progenitor cells such as pluripotent stem cells and early progenitor subsets that may mature or differentiate into somatic cells. The cells may be naturally occurring or generated by cytokine exposure, artificial/genetically modified cells (such as iPSCs and other artificial cell types). The immune cell may be an artificial cell subset including induced pluripotent stem cells and cells maturated therefrom. Preferred immune cells are cells with cytotoxic effector function such as alpha-beta T cells, NK cells, NKT cells, ILC, CIK cells, LAK cells or gamma-delta T cells. “Effector function” means a specialised function of a cell, e.g. in a T cell an effector function may be cytolytic activity or helper cell activity including the secretion of cytokines.

[0220] The term “treat” (treatment of) a disorder as used herein means to reduce the frequency or severity of at least one sign or symptom of a disease or disorder experienced by a subject.

[0221] The term “expression” as used herein is defined as the transcription and/or translation of a particular nucleotide sequence driven by its promoter in a cell.

### Chimeric Antigen Receptor (CAR)

[0222] The term cancer-specific CAR (T cell) targeting refers to the use of a CAR T cell for binding to a target antigen that is presented on the cell surface of tumour cells, but is not typically found on the surface of a healthy cell. In other words, normal cells under normal circumstances may be characterised by the absence of the target antigen on the extracellular membrane (and therefore the presence of the antigen on the cell surface cannot be detected). However, such cells may express mRNA encoding the antigen at an intracellular level. As CAR T cells only recognize surface-expressed antigens, the intracellular expression of the targeted proteins will not lead to CAR engagement.

[0223] The targeted epitopes E200 and E300 of the P2X₇ receptor are not exposed on the form of the receptor found in healthy tissue and thus these epitopes can be regarded as cancer specific. In other words, the E200 and E300 epitopes are only exposed, and available for binding when the P2X₇ receptor has an altered non-functional conformation, such as occurs in the context of cancer (in which case the receptor is referred to as nfP2X₇ receptor). Another example of a cancer-specific targeted epitope may be derived from the splice variant EGFRvIII. Still another example is the antigen CLDN6 which is mostly restricted to embryonic and foetal life and has very limited expression in healthy cells after the early phase in life and may be regarded as highly restricted and relatively overexpressed in cancer. The present invention contemplates the binding any such tumour-specific antigen, including nfP2X₇, EGFRvIII and CLDN6 for cancer-specific targeting and engaging CAR T cells via the bridging molecules described herein to cancer-associated antigens.

[0224] In general, a CAR may comprise an extracellular domain (extracellular part) comprising the antigen binding domain, a transmembrane domain and an intracellular signaling domain. The extracellular domain may be linked to the transmembrane domain by a linker. The extracellular domain may also comprise a signal peptide. The extracellular part of the CAR of the present invention comprises a tumour-specific antigen binding domain. For example, the tumour-specific antigen may be any one described herein, including nfP2X₇, EGFRvIII or CLDN6.

[0225] The tumour-specific antigen binding domain may be a nfP2X₇ binding domain that recognises the E200 (or E300 or E200-300 composite) epitope as disclosed herein.

[0226] Specifically, the CAR as disclosed herein has an extracellular nfP2X₇ E200 (or E300 or E200-300 composite) binding domain as an antigen binding domain. Alternatively, the tumour-specific antigen binding domain may be an EGFRvIII binding domain that recognises an epitope resulting out of the fusion of the amino acid sequence starting at position 25-29 LEEKK, followed by the insertion of G and the subsequent amino acid sequence 298-304 NYVVTDH, the total epitope is a 13-mer comprised of the sequence LEEKKGNYVVTDH (SEQ ID NO: 267). Alternatively, the tumour-specific antigen binding domain may be a CLDN6 binding domain that recognises an epitope in the second extracellular domain of CLDN6 [UniProtKB—P56747 (CLDN6_HUMAN)] via the amino acid sequence of SEQ ID NO: 273, 274 or 275.

[0227] Typically, the antigen-recognition domain includes a binding polypeptide that includes amino acid sequence homology to one or more complementarity determining regions (CDRs) of an antibody that binds to a tumour-specific antigen (such as a dysfunctional P2X₇ receptor, EGFRvIII or CLDN6). In any embodiment, the binding polypeptide includes amino acid sequence homology to the CDR1, 2 and 3 domains of the V_{H} and/or V_{L} chain of an antibody that binds to a tumour-specific antigen (such as a dysfunctional P2X₇ receptor, EGFRvIII or CLDN6).

[0228] In particularly preferred embodiments of the invention, the antigen-recognition domain of the CAR binds to an epitope of the tumour-specific antigen nfP2X₇.

[0229] In such embodiments, the binding polypeptide comprises the amino acid sequence of the CDRs of the V_{H} and/or V_{L} chain of an antibody described in any one of: PCT/AU2002/000061 or PCT/AU20021001204 (or in any one of the corresponding U.S. Pat. Nos. 7,326,415, 7,888,473, 7,531,171, 8,080,635, 8,399,617, 8,709,425, 9,663,584, or U.S. Pat. No. 10,450,380), PCT/AU2007/001540 (or in corresponding U.S. Pat. No. 8,067,550), PCT/AU2007/001541 (or in corresponding US publication US 2010-0036101), PCT/AU2008/001364 (or in any one of the corresponding U.S. Pat. Nos. 8,440,186, 9,181,320, 9,944,701 or U.S. Pat. No. 10,597,451), PCT/AU2008/001365 (or in any one of the corresponding U.S. Pat. No. 8,293,491 or U.S. Pat. No. 8,658,385), PCT/AU2009/000869 (or in any one of the corresponding U.S. Pat. No. 8,597,643, 9,328,155 or 10,238,716), PCT/AU2010/001070 (or in any one of the corresponding publications WO/2011/020155, U.S. Pat. Nos. 9,127,059, 9,688,771, or U.S. Pat. No. 10,053,508), and PCT/AU2010/001741 (or in any one of the corresponding publications WO 2011/075789 or U.S. Pat. No. 8,835,609) the entire contents of which are hereby incorporated by reference. Preferably the binding polypeptide comprises the amino acid sequence of the CDRs of the V_{H} and/or V_{L} chain of antibody 2-2-1 described in PCT/AU2010/001070 (or in any one of the corresponding U.S. Pat. Nos. 9,127,059, 9,688,771, or U.S. Pat. No. 10,053,508) or BPM09 described in PCT/AU2007/001541 (or in corresponding US publication US 2010-0036101) and produced by the hybridoma AB253 deposited with the European Collection of Cultures (ECACC) under Accession no. 06080101, WO2013185010A1 or WO2019056023. Alternatively, the binding polypeptide of the CAR may comprise the amino acid sequences of the CDRs of the antibody sdAbs 2-2-3, 2-472-2, or 2-2-12 described in WO 2017/041143 (also published as US 2019/0365805), and WO 2019/222796 (corresponding to U.S. application Ser. No. 17/057,060), incorporated herein by reference.

[0230] The binding polypeptide of the CAR may comprise the amino acid sequence of the V_{H} and/or V_{L} chains of an antibody described in any one of: PCT/AU2002/000061 or PCT/AU2002/001204 (or in any one of the corresponding U.S. Pat. Nos. 7,326,415, 7,888,473, 7,531,171, 8,080,635, 8,399,617, 8,709,425, 9,663,584, or U.S. Pat. No. 10,450,380), PCT/AU2007/001540 (or in corresponding U.S. Pat. No. 8,067,550), PCT/AU2007/001541 (or in corresponding US publication US 2010-0036101), PCT/AU2008/001364 (or in any one of the corresponding U.S. Pat. Nos. 8,440,186, 9,181,320, 9,944,701 or U.S. Pat. No. 10,597,451), PCT/AU2008/001365 (or in any one of the corresponding U.S. Pat. No. 8,293,491 or U.S. Pat. No. 8,658,385), PCT/AU2009/000869 (or in any one of the corresponding U.S. Pat. No. 8,597,643, 9,328,155 or 10,238,716), PCT/AU2010/001070 (or in any one of the corresponding publications WO/2011/020155, U.S. Pat. Nos. 9,127,059, 9,688,771, or U.S. Pat. No. 10,053,508), and PCT/AU2010/001741 (or in any one of the corresponding publications WO 2011/075789 or U.S. Pat. No. 8,835,609) the entire contents of which are hereby incorporated by reference. Preferably the binding polypeptide comprises the amino acid sequence of the V_{H} and/or V_{L} chains of the antibody 2-2-1 described in PCT/AU2010/001070 (or in any one of the corresponding U.S. Pat. Nos. 9,127,059, 9,688,771, or U.S. Pat. No. 10,053,508) or BPM09 described in PCT/AU2007/001541 (or in corresponding US publication US 2010-0036101) and produced by the hybridoma AB253 deposited with the European Collection of Cultures (ECACC) under Accession no. 06080101, WO2013185010A1 or WO2019056023. Alternatively, the binding polypeptide of the CAR may comprise the amino acid sequences of the V_{H} and/or V_{L} chains of the antibody sdAbs 2-2-3, 2-472-2, or 2-2-12 described in WO 2017/041143 (also published as US 2019/0365805), and WO 2019/222796 (corresponding to U.S. application Ser. No. 17/057,060), incorporated herein by reference.

[0231] The binding polypeptide of the CAR may comprise the amino acid sequence of an antibody or fragment thereof described in any one of: PCT/AU2002/000061 or PCT/AU2002/001204 (or in any one of the corresponding U.S. Pat. Nos. 7,326,415, 7,888,473, 7,531,171, 8,080,635, 8,399,617, 8,709,425, 9,663,584, or U.S. Pat. No. 10,450,380), PCT/AU2007/001540 (or in corresponding U.S. Pat. No. 8,067,550), PCT/AU2007/001541 (or in corresponding US publication US 2010-0036101), PCT/AU2008/001364 (or in any one of the corresponding U.S. Pat. Nos. 8,440,186, 9,181,320, 9,944,701 or U.S. Pat. No. 10,597,451), PCT/AU2008/001365 (or in any one of the corresponding U.S. Pat. No. 8,293,491 or U.S. Pat. No. 8,658,385), PCT/AU2009/000869 (or in any one of the corresponding U.S. Pat. No. 8,597,643, 9,328,155 or 10,238,716), PCT/AU2010/001070 (or in any one of the corresponding publications WO/2011/020155, U.S. Pat. Nos. 9,127,059, 9,688,771, or U.S. Pat. No. 10,053,508), and PCT/AU2010/001741 (or in any one of the corresponding publications WO 2011/075789 or U.S. Pat. No. 8,835,609) the entire contents of which are hereby incorporated by reference. Preferably the binding polypeptide comprises the amino acid sequence of sdAb 2-2-1 described in PCT/AU2010/001070 (or in any one of the corresponding U.S. Pat. Nos. 9,127,059, 9,688,771, or U.S. Pat. No. 10,053,508) or antibody BPM09 described in PCT/AU2007/001541 (or in corresponding US publication US 2010-0036101) and produced by the hybridoma AB253 deposited with the European Collection of Cultures (ECACC) under Accession no. 06080101, WO2013185010A1 or WO2019056023. Alternatively, the binding polypeptide may comprise the amino acid sequences of sdAbs 2-2-3, 2-472-2, or 2-2-12 described in WO 2017/041143 (also published as US 2019/0365805), and WO 2019/222796 (corresponding to U.S. application Ser. No. 17/057,060), incorporated herein by reference.

[0232] A “signal peptide” refers to a peptide sequence that directs the transport and localisation of the protein within a cell, e.g. to a certain cell organelle (such as the endoplasmic reticulum) and/or the cell surface.

[0233] Generally, an “antigen binding domain” refers to the region of the CAR that specifically binds to an antigen (and thereby is able to target a cell containing the antigen). The CARs of the invention may comprise one or more antigen binding domains. Generally, the targeting regions on the CAR are extracellular. The antigen binding domain may comprise an antibody or an antibody binding fragment thereof. The antigen binding domain may comprise, for example, full length heavy chain, Fab fragments, single chain Fv (scFv) fragments, divalent single chain antibodies or diabodies. Any molecule that binds specifically to a given antigen such as affibodies or ligand binding domains from naturally occurring receptors may be used as an antigen binding domain. Often the antigen binding domain is a scFv. Normally, in a scFv the variable regions of an immunoglobulin heavy chain and light chain are fused by a flexible linker to form a scFv. Such a linker may be for example the “(G₄/S₁)₃-linker” and variations thereof but the skilled person will appreciate that various linker sequences and formats may be used.

[0234] In some instances, it is beneficial for the antigen binding domain to be derived from the same species in which the CAR will be used in. For example, when it is planned to use it therapeutically in humans, it may be beneficial for the antigen binding domain of the CAR to comprise a human or humanised antibody or antigen binding fragment thereof. Human or humanised antibodies or antigen binding fragments thereof can be made by a variety of methods well known in the art. The CAR as disclosed herein has an extracellular linker/label epitope binding domain as an antigen binding domain allowing it to bind indirectly via a target cell binding molecule as disclosed herein to an antigen expressed on a target cell.

[0235] “Spacer” or “hinge” as used herein refers to the hydrophilic region that is between the antigen binding domain and the transmembrane domain. The CARs of the invention may comprise an extracellular spacer domain but it is also possible to leave out such a spacer. The spacer may include e.g. Fc fragments of antibodies or fragments thereof, hinge regions of antibodies or fragments thereof, CH2 or CH3 regions of antibodies, accessory proteins, artificial spacer sequences or combinations thereof. A prominent example of a spacer is the CD8alpha hinge.

[0236] The transmembrane domain of the CAR may be derived from any desired natural or synthetic source for such a domain. When the source is natural, the domain may be derived from any membrane-bound or transmembrane protein. The transmembrane domain may be derived for example from CD8alpha or CD28. When the key signalling and antigen recognition modules (domains) are on two (or even more) polypeptides, then the CAR may have two (or more) transmembrane domains. The splitting of key signalling and antigen recognition modules enables small molecule-dependent, titratable and reversible control over CAR cell expression (Wu et al, 2015, Science 350: 293-303) due to small molecule-dependent heterodimerising domains in each polypeptide of the CAR.

[0237] The cytoplasmic domain (or the intracellular signaling domain) of the CAR is responsible for activation of at least one of the normal effector functions of the immune cell in which the CAR is expressed. “Effector function” means a specialised function of a cell, e.g. in a T cell an effector function may be cytolytic activity or helper cell activity including the secretion of cytokines. The intracellular signalling domain refers to the part of a protein that transduces the effector function signal and directs the cell expressing the CAR to perform a specialised function. The intracellular signalling domain may include any complete, mutated or truncated part of the intracellular signalling domain of a given protein sufficient to transduce a signal that initiates or blocks immune cell effector functions.

[0238] The function of the intracellular domains may be pro- or anti-inflammatory and/or immunomodulatory, or a combination of such.

[0239] Prominent examples of intracellular signalling domains for use in the CARs include the cytoplasmic signaling sequences of the T cell receptor (TCR) and co-receptors that initiate signal transduction following antigen receptor engagement.

[0240] Generally, T cell activation can be mediated by two distinct classes of cytoplasmic signalling sequences, firstly those that initiate antigen-dependent primary activation through the TCR (primary cytoplasmic signalling sequences) and secondly those that act in an antigen-independent manner to provide a secondary or co-stimulatory signal (secondary cytoplasmic signalling sequences, co-stimulatory signalling domain). Therefore, an intracellular signalling domain of a CAR may comprise one or more primary cytoplasmic signalling domains and/or one or more secondary cytoplasmic signalling domains.

[0241] Primary cytoplasmic signalling sequences that act in a stimulatory manner may contain ITAMs (immunoreceptor tyrosine-based activation motifs) signalling motifs.

[0242] Examples of ITAM containing primary cytoplasmic signalling sequences often used in CARs are those derived from TCR zeta (CD3 zeta), FcR gamma, FcR beta, CD3 gamma, CD3 delta, CD3 epsilon, CD5, CD22, CD79a, CD79b and CD66d. Most prominent is the sequence derived from CD3 zeta.

[0243] The cytoplasmic domain of the CAR may be designed to comprise the CD3-zeta signaling domain by itself or combined with any other desired cytoplasmic domain(s). The cytoplasmic domain of the CAR can comprise a CD3 zeta chain portion and a co-stimulatory signalling region. The co-stimulatory signalling region refers to a part of the CAR comprising the intracellular domain of a co-stimulatory molecule. A co-stimulatory molecule is a cell surface molecule other than an antigen receptor or their ligands that is required for an efficient response of lymphocytes to an antigen. Examples for a co-stimulatory molecule are CD27, CD28, 4-1 BB (CD137), OX40, CD30, CD40, PD-1, ICOS, lymphocyte function-associated antigen-1 (LFA-1), CD2, CD7, LIGHT, NKG2C and B7-H3.

[0244] The cytoplasmic signalling sequences within the cytoplasmic signalling part of the CAR may be linked to each other with or without a linker in a random or specified order. A short oligo- or polypeptide linker, which is preferably between 2 and 10 amino acids in length, may form the linkage. A prominent linker is the glycine-serine doublet.

[0245] As an example, the cytoplasmic domain may comprise the signalling domain of CD3-zeta and the signalling domain of CD28. In another example the cytoplasmic domain may comprise the signalling domain of CD3-zeta and the signalling domain of CD27. In a further example, the cytoplasmic domain may comprise the signalling domain of CD3-zeta, the signalling domain of CD28, and the signalling domain of CD27.

[0246] As aforementioned, either the extracellular part or the transmembrane domain or the cytoplasmic domain of a CAR may also comprise a heterodimerising domain for the aim of splitting key signalling and antigen recognition modules of the CAR.

[0247] Non-limiting examples of CARs that may be used in accordance with the present invention are set forth in SEQ ID NOs: 165-167, 266 or 272. An example of the architecture of various CAR molecules is also provided herein in FIG. 35. Further examples of CARs that may be used in accordance with the invention, are provided in WO 2017/041143 (also published as US 2019/0365805), and WO 2019/222796 (corresponding to U.S. application Ser. No. 17/057,060), incorporated herein by reference.

[0248] A CAR for use in accordance with the present invention, i.e. a CAR comprising an nfP2X₇ E200 binding domain, may be designed to comprise any portion or part of the above-mentioned domains as described herein in any order and/or combination resulting in a functional CAR.

[0249] The CARs as disclosed herein, or polypeptide(s) derived therefrom, nucleic acid molecule(s) or recombinant expression vectors cells encoding said CARs, or populations of cells expressing said CARs, may be isolated and/or purified. The term “isolated” means altered or removed from the natural state. For example, an isolated population of cells means an enrichment of such cells and separation from other cells that are normally associated in their naturally occurring state with said isolated cells. An isolated population of cells means a population of substantially purified cells that are a more homogenous population of cells than found in nature. Preferably, the enriched cell population comprises at least about 90% of the selected cell type. In particular aspects, the cell population comprises at least about 90%, 91%, 92%, 93%, 94%, 95%, 96%, 97%, 98%, 99%, or even 100% of the selected cell type.

[0250] The affinity at which the dysfunctional P2X₇ receptor binding domain of the CAR binds to the nfP2X₇ recognition site E200 of the bridging molecule can vary, but generally the binding affinity may be in the range of 100 μM, 1 nM, 10 nM, or 100 nM, preferably at least about 1 pM or 10 pM, even more preferably at least about 100 pM.

[0251] CAR T cells targeted to EGFRvIII may be used to treat solid cancers. EGFRvIII is a frequent splice variant of EGFR skipping exons 2-7. EGFRvIII is tumour specific and does not occur in healthy cells as EGFR is tightly regulated in normal cells. EGFRvIII is commonly expressed in glioblastoma but also in breast cancer and head and neck cancer. The EGFRvIII-CAR T in this context may have the sequence (SEQ ID NO: 266) and is targeted to the epitope resulting out of the fusion of the amino acid sequence starting at position 25-29 LEEKK, followed by the insertion of G and the subsequent amino acid sequence 298-304 NYVVTDH, the total epitope comprises or consists of the sequence LEEKKGNYVVTDH (SEQ ID NO: 267). The complete EGFR sequence is found at UniProtKB—P00533 (EGFR_HUMAN) and the complete protein counts 1210 amino acids in isoform 1.

[0252] EGFRvIII targeted CAR T cells may be used to treat glioblastoma in a conventional way to target EGFRvIII on cancer cells, but may also be redirected to other cancer-associated target antigens via the bridging molecules described herein if the EGFRvIII epitope moiety is integrated into the sequence of bridging molecules. The EGFRvIII CAR T cells then can be used in the same manner as outlined for the nfP2X₇ CAR targeted approach described herein. The peptide tag may be the 13-mer peptide LEEKKGNYVVTDH or a shortened or extended natural or artificial variant thereof, of SEQ ID NO: 267.

[0253] The amino acid sequence of EGFRvIII CAR compatible bridging molecules targeted to CD33 and Her2 are described in Table 1 as SEQ ID NO: 268 and 269, and SEQ ID NO: 270 and 271, respectively.

[0254] CLDN6 targeted CAR T cells may be used to treat solid cancers e.g. ovarian cancer. The CLDN6-CAR T in this context may have the sequence (SEQ ID NO: 272) and is targeted to the second extracellular domain of CLDN6 [UniProtKB-P56747 (CLD6_HUMAN] cells directly via the amino acid sequence [ECD2, >sp|P56747|138-160 WTAHAIIRDFYNPLVAEAQKREL (SEQ ID NO: 273)] but may also be redirected to other cancer-associated target antigens, e.g. CD33 or Her2 via the bridging molecules described herein, if the CLDN6 epitope moiety is integrated into the sequence of bridging molecules. The CLDN6 CAR T cells then can be used in the same manner as outlined for the nfP2X₇ CAR targeted approach described herein. The peptide tag may be the 23-mer peptide WTAHAIIRDFYNPLVAEAQKREL or a shortened or extended natural or artificial variant thereof, such as SEQ ID NO: 274 or 275.

### Bridging Molecule

[0255] It will be appreciated that the bridging molecule may be in any form, provided that it comprises a) a targeting moiety for binding a target cell and b) a tumour-specific antigen epitope moiety. Preferably, the tumour-specific antigen epitope moiety is, or comprises, a dysfunctional P2X₇ receptor epitope moiety, a EGFRvIII epitope moiety or a CLDN6 epitope moiety, preferably such that the epitope moiety is recognised by the tumour-specific CAR which is being redirected, in accordance with the methods of the invention.

[0256] Typically, the targeting moiety is in the form of a fusion protein in which the targeting moiety is linked to the tumour-specific antigen epitope moiety, preferably dysfunctional P2X₇ receptor epitope moiety, directly or via a linker.

[0257] It will be appreciated that the bridging molecule may have any of a different number of architectures. For example, and as described further herein, the targeting moiety for binding a target cell may be in the form of any suitable binding domain, such as derived from an antibody, or fragments thereof. The targeting moiety may be linked to the tumour-specific antigen epitope moiety in any configuration. For example, the tumour-specific antigen epitope moiety may be linked to the N- or C-terminus of the targeting moiety. Examples of suitable architectures are provided in the Figures herein. In particularly preferred embodiments, the tumour-specific antigen epitope moiety is linked to the targeting moiety via its C terminal region, such that the N-terminal region of tumour-specific antigen epitope moiety is freely accessible for binding by the tumour-specific CAR.

[0258] Any suitable linker may be used for linking targeting moiety to the tumour-specific antigen epitope moiety. The linker may comprise a polypeptide, a peptide or a chemical group.

[0259] A linker may be a peptide having a length of up to 20 amino acids. The term “linked to” or “fused to” refers to a covalent bond, e.g., a peptide bond, formed between two moieties. Accordingly, in the context of the present invention the linker may have a length of 1, 2, 3, 4, 5, 6, 7, 8, 9, 10, 11, 12, 13, 14, 15, 16, 17, 18, 19, 20, 21 or 22 amino acids. For example, the herein provided bridging molecule may comprise a linker between the targeting moiety and tumour-specific antigen epitope moiety, preferably the dysfunctional P2X₇ receptor epitope moiety. Such linkers have the advantage that they can make it more likely that the different polypeptides of the fusion protein fold independently and behave as expected.

[0260] The skilled person will be familiar with the design and use of various peptide linkers comprised of various amino acids, and of various lengths, which would be suitable for use as linkers in accordance with the present invention. The linker may comprise various combinations of repeated amino acid sequences. The linker may be a flexible linker (such as those comprising repeats of glycine and serine residues), a rigid linker (such as those comprising glutamic acid and lysine residues, flanking alanine repeats) and/or a cleavable linker (such as sequences that are susceptible by protease cleavage).

[0261] The peptide linker may be any one or more repeats of Gly-Ser (GS), Gly-Gly-Ser (GGS), Gly-Gly-Gly-Ser (GGGS) or Gly-Gly-Gly-Gly-Ser (GGGGS) or variations thereof. In any embodiment, the linker may comprise or consist of the sequence GGGGSGGGGSGGGGS, i.e. (G4S)₃.

[0262] In any embodiment, the peptide linker can include the amino acid sequence GGGGGS (a linker of 6 amino acids in length) or even longer. The linker may be a series of repeating glycine and serine residues (GS) of different lengths, i.e., (GS)n where n is any number from 1 to 15 or more. For example, the linker may be (GS)₃ (i.e., GSGSGS) or longer (GS)₁₁ or longer. It will be appreciated that n can be any number including 1, 2, 3, 4, 5, 6, 7, 8, 9, 10, 11 or more.

[0263] In further embodiments, the linker may comprise inclusion of an amino acid that provides rigidity, such as lysine. For example, in certain embodiments, the linker region may also comprise the sequence GSGK.

[0264] The peptide linker may consist of a series of repeats of Thr-Pro (TP) comprising one or more additional amino acids N and C terminal to the repeat sequence. For example, the linker may comprise or consist of the sequence GTPTPTPTPTGEF (also known as the TP5 linker). In further aspects, the linker may be a short and/or alpha-helical rigid linker (e.g. A(EAAAK)3A, PAPAP or a dipeptide such as LE or CC).

[0265] In further embodiments, as an alternative or in addition to a glycine-serine-based linker region as described above, the targeting moiety may be in the form of a fusion protein in which the targeting moiety is linked to the tumour-specific antigen epitope moiety, preferably dysfunctional P2X₇ receptor epitope moiety, via a hinge region. The linking between the targeting moiety and tumour-specific antigen epitope moiety may comprise a combination of hinge region and linker regions.

[0266] Examples of suitable hinge regions include hinge regions derived from immunoglobulins. The hinge region may be derived from an IgG1, IgG2, IgG3 or IgG4, and may comprise one or more amino acid substitutions, (for example to prevent or reduce the likelihood of disulphide bridge formation). Alternative hinge sequences may be derived from alternative immunoglobulin domains, CD8A, CD8B, CD4 or CD28, TRAC, TRBC, TRGC, TRDC.

[0267] Table 2 below provides non-limiting examples of suitable hinge regions for use in joining the targeting moiety and tumour-specific antigen epitope moiety, in the bridging molecules of the invention.

[0268] It will be appreciated that the targeting moiety may be joined to the tumour-specific antigen epitope moiety by more than one linker and/or more than one hinge region. For example, the fusion protein may comprise (N to C terminus), the tumour-specific antigen epitope moiety, conjugated directly to the targeting moiety. Alternatively, the fusion protein may comprise the tumour-specific antigen epitope moiety, followed by a linker region, then the targeting moiety. Further still, the fusion protein may comprise the tumour-specific antigen epitope moiety, followed by a linker region, then a hinge region, and then the targeting moiety. In a further embodiment still, the fusion protein may comprise the tumour-specific antigen epitope moiety, followed by a linker region, then a hinge region, a further linker region, then the targeting moiety. Of course, the skilled person will appreciate that the alternative configuration is possible (ie wherein the tumour-specific antigen epitope moiety is joined to the C terminus of the targeting moiety, via one or more linker and/or hinge regions.

TABLE 2
exemplary hinge regions

| Amino acid sequence | SEQ ID NO: | Description |
|---|---|---|
| EPKSSDKTHTSPPSP | 310 | Sequences derived from IgG1 (ie |
| EPKSSDKTHTSPP | 311 | modified IgG1 hinge regions) |
| EPKSSDKTHTSPPP | 312 | |
| EPKSSDKTHT | 313 | |
| DKTHTSPPSP | 314 | |
| DKTHTSPP | 315 | |
| EPKSDKTHTPPP | 316 | |
| EPKSDKTHTSPPSP | 317 | |
| EPKSGDKTHTGPPGP | 318 | |
| EPKSGDKTHTGPP | 319 | |
| EPKSGDKTHTGPPP | 320 | |
| EPKSGDKTHT | 321 | |
| DKTHTGPPGP | 322 | |
| DKTHTGPP | 323 | |
| EPKSDKTHTGPPGP | 324 | |
| EPKSGDKTHTSPPSP | 325 | |
| EPKSGDKTHTGPPSP | 326 | |
| EPKSSDKTHTGPPGP | 327 | |
| EPKSSDKTHTGPPSP | 328 | |
| EPKSSDKTHTGPP | 329 | |
| EPKSGDKTHTSPP | 330 | |
| EPKSTDKTHTTPPIP | 331 | |
| EPKSTDKTHTTPP | 332 | |
| EPKSTDKTHTTPPP | 333 | |
| EPKSTDKTHT | 334 | |
| DKTHTTPPTP | 335 | |
| DKTHTTPP | 336 | |
| EPKSDKTHTTPPTP | 337 | |
| EPKSSDKTHTTPPTP | 338 | |
| EPKSSDKTHTSPPTP | 339 | |
| EPKSADKTHTLPPMP | 340 | |
| EPKSVDKTHTLPPTP | 341 | |
| EPKSLDKTHTAPPAP | 342 | |
| EPKSYDKTHTAPP | 343 | |
| EPKSIDKTHTLPP | 344 | |
| DKTHTAPPLP | 345 | |
| DKTHTVPPLP | 346 | |
| EPKSSDKTHTSP | 406 | |
| EPKSCDKTHTCPPQP | 347 | |
| ERKCCVECPPCP | 348 | |
| ERKXXVEXPPXP | 349 | |
| ERKXXVEXPP | 350 | Mutated IgG2 |
| VEXPPXP | 351 | Mutated IgG2 |
| ELKTPLGDTTHTCPRCP | 352 | Wild-type IgG3 |
| ELKTPLGQTTHTXPRXP | 353 | Mutated IgG3 |
| ELKTPLGDTTHTXPR | 354 | Mutated IgG3 |
| ELKTPLGDTTHT | 355 | Mutated IgG3 |
| EPKSCDTPPPCPRQP | 356 | Wild-type IgG3 |
| EPKSXDTPPPXPRXP | 357 | Mutated IgG3 |
| EPKSXDTPPPXPR | 358 | Mutated IgG3 |
| EPKSXDTPPP | 359 | Mutated IgG3 |
| DTPPPXPRXP | 360 | Mutated IgG3 |
| ESKYGPPCPSCP | 361 | Wild-type IgG4 |
| EXKYGPPCPXCP | 362 | Mutated IgG4 |
| EXKYGPPCP | 363 | Mutated IgG4 |
| KYGPPCPXCP | 364 | Mutated IgG4 |
| EPKSCDKTHTCP | 401 | Wild type IgG 1 (v2) |
| EPKSCDTPPPCP | 402 | Wild type IgG3 (v2) |
| ESKYGPPSPSSP | 403 | Mutated IgG4 |
| ERKSSVESPPSP | 404 | Mutated IgG2 |
| EPKSSDTPPPSP | 405 | Mutated IgG3 |

### Targeting Moiety of the Bridging Molecule

[0269] The targeting moiety of the bridging molecule may bind to a cell surface molecule on a target cell. The cell surface molecule may comprise an antigen. The cell surface molecule may be selected from a protein, a lipid moiety, a glycoprotein, a glycolipid, a carbohydrate, a polysaccharide, a nucleic acid, an MHC-bound peptide, or a combination thereof. The cell surface molecule may comprise parts (e.g., coats, capsules, cell walls, flagella, fimbriae, and toxins) of bacteria, viruses, and other microorganisms. The cell surface molecule may be expressed by the target cell. The cell surface molecule may not be expressed by the target cell. By way of non-limiting example, the cell surface molecule may be a ligand expressed by a cell that is not the target cell and that is bound to the target cell or a cell surface molecule of the target cell. Also, by non-limiting example, the cell surface molecule may be a toxin, exogenous molecule or viral protein that is bound to a cell surface or cell surface receptor of the target cell.

[0270] The bridging molecules may interact with a plurality of target cells. The target cell may be an infected cell. The target cell may be a pathogenically infected cell. The target cell may be a diseased cell. The target cell may be a genetically modified cell. The target cell may not be a host cell. The target cell may come from an invading organism (e.g. yeast, worm, bacteria, fungus). Further disclosed herein are bridging molecules that interact with a molecule on a non-cell target. The non-cell target may be a virus or a portion thereof. The non-cell target may be a fragment of a cell. The non-cell target may be an extracellular matrix component or protein.

[0271] The target cell may be derived from a tissue. The tissue may be selected from brain, oesophagus, breast, gut, intestine, colon, lung, glia, ovary, uterus, testes, prostate, gastrointestinal tract, bladder, liver, spleen, thymus, bone, fat and skin. The target cell may be derived from one or more endocrine glands. Alternatively, or additionally, the target cell may be derived from one or more endocrine glands. The endocrine gland may be a lymph gland, pituitary gland, thyroid gland, parathyroid gland, pancreas, gonad or pineal gland.

[0272] The target cell may be selected from a stem cell, a pluripotent cell, a hematopoietic stem cell or a progenitor cell. The target cell may be a circulating cell.

[0273] The target cell may be an immune cell.

[0274] The target cell may be a cancer stem cell. The target cell may be a cancer cell. The cancer cell may be derived from a tissue. The tissue may be selected from, by way of non-limiting example, a brain, an oesophagus, a breast, a colon, a lung, a glia, an ovary, a uterus, a testicle, a prostate, a gastrointestinal tract, a bladder, a liver, a thyroid and skin. The cancer cell may be derived from bone. The cancer cell may be derived from blood. The cancer cell may be derived from a B cell, a T cell, a monocyte, a thrombocyte, a leukocyte, a neutrophil, an eosinophil, a basophil, a lymphocyte, a hematopoietic stem cell or an endothelial cell progenitor. The cancer cell may be derived from a CD19-positive B lymphocyte. The cancer cell may be derived from a stem cell. The cancer cell may be derived from a pluripotent cell. The cancer cell may be derived from one or more endocrine glands. The endocrine gland may be a lymph gland, pituitary gland, thyroid gland, parathyroid gland, pancreas, gonad or pineal gland.

[0275] The cell surface molecule of the target cell may be a receptor. The receptor may be an extracellular receptor. The receptor may be a cell surface receptor. By way of non-limiting example, the receptor may bind a hormone, a neurotransmitter, a cytokine, a growth factor or a cell recognition molecule. The receptor may be a transmembrane receptor. The receptor may be an enzyme-linked receptor. The receptor may be a G-protein couple receptor (GPCR). The receptor may be a growth factor receptor. By way of non-limiting example, the growth factor receptor may be selected from an epidermal growth factor receptor, a fibroblast growth factor receptor, a platelet derived growth factor receptor, a nerve growth factor receptor, a transforming growth factor receptor, a bone morphogenic protein growth factor receptor, a hepatocyte growth factor receptor, a vascular endothelial growth factor receptor, a stem cell factor receptor, an insulin growth factor receptor, a somatomedin receptor, an erythropoietin receptor and homologs and fragments thereof. The receptor may be a hormone receptor. The receptor may be an insulin receptor. By way of non-limiting example, the receptor may be selected from an eicosanoid receptor, a prostaglandin receptor, an oestrogen receptor, a follicle stimulating hormone receptor, a progesterone receptor, a growth hormone receptor, a gonadotropin-releasing hormone receptor, homologs thereof and fragments thereof. The receptor may be an adrenergic receptor. The receptor may be an integrin. The receptor may be an Eph receptor. The receptor may be a luteinising hormone receptor. The cell surface molecule may be at least about 50% homologous to a luteinising hormone receptor. The receptor may be an immune receptor. By way of non-limiting example, the immune receptor may be selected from a pattern recognition receptor, a toll-like receptor, a NOD-like receptor, a killer-activated receptor, a killer inhibitor receptor, an Fc receptor, a B cell receptor, a complement receptor, a chemokine receptor and a cytokine receptor. By way of non-limiting example, the cytokine receptor may be selected from an interleukin receptor, an interferon receptor, a transforming growth factor receptor, a tumour necrosis factor receptor, a colony stimulating factor receptor, homologs thereof and fragments thereof. The receptor may be a receptor kinase. The receptor kinase may be a tyrosine kinase receptor. The receptor kinase may be a serine kinase receptor. The receptor kinase may be a threonine kinase receptor. By way of non-limiting example, the receptor kinase may activate a signalling protein selected from a Ras, a Raf, a PI3K, a protein kinase A, a protein kinase B, a protein kinase C, an AKT, an AMPK, a phospholipase, homo logs thereof and fragments thereof. The receptor kinase may activate a MAPK/ERK signalling pathway. The receptor kinase may activate Jak, Stat or Smad.

[0276] The cell surface molecule may be a non-receptor cell surface protein. The cell surface molecule may be a cluster of differentiation proteins. By way of non-limiting example, the cell surface molecule may be selected from CD3, CD4, CD8, CD11a, CD11b, CD13, CD14, CD15, CD16, CD22, CD24, CD25, CD30, CD31, CD33, CD34, CD38, CD45, CD56, CD61, CD91, CD114, CD117, CD182, CD200, fragments thereof, and homologs thereof.

[0277] The cell surface molecule of the target cell may be a molecule that does not comprise a peptide. The cell surface molecule may comprise a lipid. The cell surface molecule may comprise a lipid moiety or a lipid group. The lipid moiety may comprise a sterol. The lipid moiety may comprise a fatty acid. The antigen may comprise a glycolipid. The cell surface molecule may comprise a carbohydrate.

[0278] The cell surface molecule of the target cell may be an antigen. The antigen may be at least a portion of a surface antigen or a cell surface marker on a cell. The antigen may be a receptor or a co-receptor on a cell. The antigen may refer to a molecule or molecular fragment that may be bound by a major histocompatibility complex (MHC) and presented to a T-cell receptor. The term “antigen” may also refer to an immunogen. The immunogen may provoke an adaptive immune response if injected on its own into a subject. The immunogen may induce an immune response by itself. The antigen may be a superantigen, T-dependent antigen or a T-independent antigen. The antigen may be an exogenous antigen. Exogenous antigens are typically antigens that have entered the body from the outside, for example by inhalation, ingestion, or injection. Some antigens may start out as exogenous antigens, and later become endogenous (for example, intracellular viruses). The antigen may be an endogenous antigen. The endogenous antigen may be an antigen that has been generated within cells as a result of normal cell metabolism, or because of pathogenic infections (e.g., viral, bacterial, fungal, parasitic). The antigen may be an autoantigen. The autoantigen may be a normal protein or complex of proteins (and sometimes DNA or RNA) that is recognised by the immune system of patients suffering from a specific autoimmune disease. These antigens should, under normal conditions, not be the target of the immune system, but, due to genetic and/or environmental factors, the normal immunological tolerance for such an antigen is not present in these patients. The antigen may be present or over-expressed due to a condition or disease. The condition or disease may be a cancer or a leukaemia. The condition may be an inflammatory disease or condition. The condition or disease may be a metabolic disease. The condition may be a genetic disorder.

[0279] The present invention also may find application for the treatment of specific B- or T-lineage associated autoimmune diseases, for example using anti-idiotypic antibodies or fragments thereof or ligands thereof for targeting the B cell receptor and/or the T cell receptor. Such diseases include myasthenia gravis, systemic lupus erythematosus (SLE), rheumatoid arthritis (RA), multiple sclerosis (MS), solid organ transplant hyperacute, acute, chronic or mix-type rejection, bone marrow or stem cell transplant rejection, and graft versus host disease.

[0280] The cell surface molecule of the target cell may be an antigen that has been designated as a tumour antigen. Tumour antigens or neo-antigens may be antigens that are presented by MHC I or MHC II molecules on the surface of tumour cells. These antigens may sometimes be presented by tumour cells and never by the normal ones. In this case, they are called tumour-specific antigens (TSAs) and, in general, result from a tumour-specific mutation. More common are antigens that are presented by tumour cells and normal cells, and they are called tumour-associated antigens (TAAs). A TAA associated antigen is not unique to a tumour cell and instead is also expressed on a normal cell under conditions that fail to induce a state of immunologic tolerance to the antigen. The expression of the antigen on the tumour may occur under conditions that enable the immune system to respond to the antigen. TAAs may be antigens that are expressed on normal cells during foetal development when the immune system is immature and unable to respond or they may be antigens that are normally present at extremely low levels on normal cells but which are expressed at much higher levels on tumour cells. Cytotoxic T lymphocytes that recognise these antigens may be able to destroy the tumour cells before they proliferate or metastasise. Tumour antigens may also be on the surface of the tumour in the form of, for example, a mutated receptor, in which case they may be recognised by B cells.

[0281] Non-limiting examples of TSA or TAA antigens include the following: Differentiation antigens such as MART-1/MelanA (MART-1), gp 100 (Pmel 17), tyrosinase, TRP-1, TRP-2 and tumour-specific multilineage antigens such as MAGE-1, MAGE-3, BAGE, GAGE-1, GAGE-2, p15; overexpressed embryonic antigens such as CEA; overexpressed oncogenes and mutated tumour-suppressor genes such as p53, Ras, HER-2/neu; unique tumour antigens resulting from chromosomal translocations such as BCR-ABL, E2A-PRL, H4-RET, IGH-IGK, MYL-RAR; and viral antigens, such as the Epstein Barr virus antigens EBVA and the human papillomavirus (HPV) antigens E6 and E7. Other large, protein-based antigens include TSP-180, MAGE-4, MAGE-5, MAGE-6, RAGE, NY-ESO, p185erbB2, p180erbB-3, c-met, nm-23HI, PSA, TAG-72, CA 19-9, CA 72-4, CAM 17.1, NuMa, K-ras, beta-Catenin, CDK4, Mum-1, p 15, p 16, 43-9F, 5T4, 791Tgp72, alpha-fetoprotein, beta-HCG, BCA225, BTAA, CA 125, CA 15-3\CA 27.29\BCAA, CA 195, CA 242, CA-50, CAM43, 20 CD68\PI, CO-029, FGF-5, G250, Ga733\EpCAM, HTgp-175, M344, MA-50, MG7-Ag, MOV18, NB/70K, NY-CO-1, RCASI, SDCCAG16, TA-90Mac-2 binding protein\cyclophilin C-associated protein, TAAL6, TAG72, TLP, and TPS.

[0282] The cell surface molecule of the target cell may be an antigen selected from the group consisting of any surface expressed antigens. Exemplary target antigens may comprise but are not limited to: CD33 (Siglec-3), CD123 (IL3RA), CD135 (FLT-3), CD44 (HCAM), CD44V6, CD47, CD184 (CXCR4), CLEC12A (CLL1), LeY, FRβ, MICA/B, CD305 (LAIR-1), CD366 (TIM-3), CD96 (TACTILE), CD133, CD56, CD29 (ITGB1), CD44 (HCAM), CD47 (IAP), CD66 (CEA), CD112 (Nectin2), CD117 (c-Kit), CD133, CD146 (MCAM), CD155 (PVR), CD171 (L1CAM), CD200 (OX-2), CD221 (IGF1), CD227 (MUC1), CD243 (MRD1), CD246 (ALK), CD271 (LNGFR), CD19, CD20, GD2, and EGFR. Other target antigens include TCR, sugars, lipids, carbohydrates or any other molecule expressed on the surface of the target cell. The antigen may be any antigen referred to in Table 1 in the context of a bridging molecule or binding construct.

[0283] In preferred embodiments, the target cell is a cancer cell and the cell surface molecule of the cancer cell is an antigen that is associated with the cancer. The antigen may be a tumour-specific antigen or a tumour-associated antigen. The antigen may be one which is associated with a particular type of cancer. For example, overexpression of the antigen may be associated with a specific cancer or specific class of cancer. For example, where the cancer is breast cancer, the antigen may be associated with breast cancer but not with another form of cancer. Alternatively, the antigen may be associated with a class of cancers such as solid tumours, but not associated with haematological (ie “liquid”) tumours, or vice versa. The antigen may be associated with cancers of a particular lineage but not with others. For example the antigen may be associated with sarcomas but not lymphomas or carcinoma. As used herein the term “associated with” in relation to cancer, will be understood to mean that the antigen's expression (whether increased or decreased) is considered a marker of the cancer. It will be appreciated that there may be low levels of expression of an antigen but this does not equate to the antigen being “associated” with a given cancer.

[0284] Suitable cancer antigens which may be bound by the targeting moiety of the bridging molecule include, but are not limited to, mesothelin (MSLN), prostate specific membrane antigen (PSMA), prostate stem cell antigen (PCSA), carbonic anhydrase IX (CAIX), carcinoembryonic antigen (CEA), CD5, CD7, CD10, CD19, CD20, CD22, CD30, CD33, CD34, CD38, CD41, CD44, CD49f, CD56, CD74, CD123, CD133, CD138, epithelial glycoprotein (EGP 2), epithelial glycoprotein-40 (EGP-40), epithelial cell adhesion molecule (EpCAM), folate-binding protein (FBP), foetal acetylcholine receptor (AChR), folate receptor-α and β (FRα and β), Ganglioside G2 (GD2), Ganglioside G3 (GD3), human Epidermal Growth Factor Receptor 2 (HER-2/ERB2), HER3, Epidermal Growth Factor Receptor vIII (EGFRvIII), ERB3, ERB4, human telomerase reverse transcriptase (hTERT), Interleukin-13 receptor subunit alpha-2 (IL-13Rα2), κ-light chain, kinase insert domain receptor (KDR), Lewis A (CA19.9), Lewis Y (LeY), L1 cell adhesion molecule (L1CAM), melanoma-associated antigen 1 (melanoma antigen family A1, MAGE-A1), Mucin 16 (Muc-16), Mucin 1 (Muc-1), NKG2D ligands, cancer-testis antigen NY-ESO-1, oncofoetal antigen (h5T4), tumour-associated glycoprotein 72 (TAG-72), vascular endothelial growth factor R2 (VEGF-R2), Wilms' tumour protein (WT-1), type 1 tyrosine-protein kinase transmembrane receptor (ROR1), B7-H3 (CD276), B7-H6 (Nkp30), Chondroitin sulfate proteoglycan-4 (CSPG4), DNAX Accessory Molecule (DNAM-1), Ephrin type A Receptor 2 (EpHA2), Fibroblast Associated Protein (FAP), Gp100/HLA-A2, Glypican 3 (GPC3), HA-1H, HERK-V, IL-1 1Ra, Latent Membrane Protein 1 (LMP1), Neural cell-adhesion molecule (N-CAM/CD56), and Trail Receptor (TRAIL R). It is understood that these or other cancer antigens can be utilised for targeting by a bridging molecule in the present invention.

[0285] The targeting moiety of the bridging molecule may be any binding molecule, for example, a full-size antibody, or fragment thereof, or any antibody or fragment thereof described herein, an immunocytokine (antibody linked to a cytokine, or fragments thereof), a ligand (protein related, peptides, sugar molecules, processed molecules, lipids, cytokines, hormones), a soluble T cell receptor (TcR), a single chain (sc) TcR, single chain T cell receptor binding motifs and a T cell receptor like mAb, an aptamer (such as DNA or RNA), a peptide (e.g. aptamers or bicyclic peptides), a toxin, a lipid or a carbohydrate.

[0286] The targeting moiety of the bridging molecule may be a polypeptide and may be a targeting antibody or antibody fragment. The targeting antibody or antibody fragment may be an immunoglobulin (Ig). The immunoglobulin may be selected from an IgG, an IgA, an IgD, an IgE, an IgM, a fragment thereof or a modification thereof. The immunoglobulin may be IgG. The IgG may be IgG1. The IgG may be IgG2. The IgG may be IgG3. The IgG may be IgG4. The IgG may have one or more Fc mutations for modulating endogenous T cell FcR binding to the bridging molecule. The IgG may have one or more Fc mutations for removing the Fc binding capacity to the FcR of FcR-positive cells. The one or more Fc mutations may remove a glycosylation site. The one or more Fc mutations may be selected from E233P, L234V, L235A, delG236, A327G, A330S, P331S, N297Q and any combination thereof. The one or more Fc mutations may be in IgG1. The one or more Fc mutations in the IgG1 may be L234A, L235A, or both. Alternatively, or additionally, the one or more Fc mutations in the IgG1 may be L234A, L235E, or both. Alternatively, or additionally, the one or more Fc mutations in the IgG1 may be N297A. Alternatively, or additionally, the one or more mutations may be in IgG2. The one or more Fc mutations in the IgG2 may be V234A, V237A, or both.

[0287] The targeting antibody or antibody fragment may be an Fc null immunoglobulin or a fragment thereof.

[0288] As used herein, the term “antibody fragment” refers to any form of an antibody other than the full-length form. Antibody fragments herein include antibodies that are smaller components that exist within full-length antibodies, and antibodies that have been engineered. Antibody fragments include, but are not limited to, Fv, Fc, Fab, and (Fab′)2, single chain Fv (scFv), diabodies, triabodies, tetrabodies, bifunctional hybrid antibodies, CDR1, CDR2, CDR3, combinations of CDRs, variable regions, framework regions, constant regions, heavy chains, light chains, alternative scaffold non-antibody molecules, and bispecific antibodies. Unless specifically noted otherwise, statements and claims that use the term “antibody” or “antibodies” may specifically include “antibody fragment” and “antibody fragments.”

[0289] The targeting antibody fragment may be human, fully human, humanised, human engineered, non-human, and/or chimeric antibody. The non-human antibody may be humanised to reduce immunogenicity to humans, while retaining the specificity and affinity of the parental non-human antibody. Chimeric antibodies may refer to antibodies created through the joining of two or more antibody genes that originally encoded for separate antibodies. A chimeric antibody may comprise at least one amino acid from a first antibody and at least one amino acid from a second antibody, wherein the first and second antibodies are different. At least a portion of the antibody or antibody fragment may be from a bovine species, a human species, or a murine species. At least a portion of the antibody or antibody fragment may be from a rat, a goat, a guinea pig or a rabbit. At least a portion of the antibody or antibody fragment may be from a human. At least a portion of the antibody or antibody fragment antibody may be from cynomolgus monkey.

[0290] The targeting antibody or antibody fragment may be based on or derived from an antibody or antibody fragment from a mammal, bird, fish, amphibian or reptile.

[0291] Mammals include, but are not limited to, carnivores, rodents, elephants, marsupials, rabbits, bats, primates, seals, anteaters, cetaceans, odd-toed ungulates and even-toed ungulates. The mammal may be a human, non-human primate, mouse, sheep, cat, dog, cow, horse, goat, or pig.

[0292] The targeting antibody or an antibody fragment may recognise or bind an antigen selected from, by non-limiting example, CD19, Her2, CLL-1, CD33, EGFRvIII, CD20, CD22, BCMA or a fragment thereof. The antigen may comprise a wild-type antigen. The antigen may comprise one or more mutations.

[0293] The targeting antibody or antibody fragment may be an anti-CD19 antibody or a fragment thereof. The targeting polypeptide may be an anti-CD22 antibody. The targeting polypeptide may be an anti-BCMA antibody or a fragment thereof. The targeting polypeptide may be an anti-EGFRvIII antibody or a fragment thereof. The targeting polypeptide may be an anti-Her2 antibody or a fragment thereof. The targeting polypeptide may comprise an anti-CD20 antibody or antibody fragment. The targeting polypeptide may comprise rituximab. The targeting polypeptide may comprise an anti-EGFR antibody or antibody fragment. The targeting polypeptide may comprise an anti-CEA antibody or antibody fragment. The targeting polypeptide may comprise an anti-CLL-1 antibody or antibody fragment. The targeting polypeptide may comprise an anti-CD33 antibody or antibody fragment. The targeting polypeptide may comprise an anti-EpCAM antibody or fragment thereof. The targeting polypeptide may comprise an anti-CD30 antibody or fragment thereof. The targeting polypeptide may comprise an anti-CD79B antibody or fragment thereof. The targeting polypeptide may comprise an anti-CD37 antibody or fragment thereof. The targeting polypeptide may comprise an anti-CD38 antibody or fragment thereof. The targeting polypeptide may comprise an anti-CD70 antibody or fragment thereof. The targeting polypeptide may comprise an anti-CD276 antibody or fragment thereof. The targeting polypeptide may comprise an anti-GD2 antibody or fragment thereof. The targeting polypeptide may comprise an anti-CD371 antibody or fragment thereof. The targeting polypeptide may comprise an anti-CD135 antibody or fragment thereof. The targeting polypeptide may comprise an anti-CD105 antibody or fragment thereof. The targeting polypeptide may comprise an anti-CD123 antibody or fragment thereof. The targeting polypeptide may comprise an anti-ROR-1 antibody or fragment thereof. The targeting polypeptide may comprise an anti-PD-L1 antibody or fragment thereof. The targeting polypeptide may comprise an anti-MET-R antibody or fragment thereof. The targeting polypeptide may comprise an anti-PDGFRalpha antibody or fragment thereof. The targeting polypeptide may comprise an anti-Her3 antibody or fragment thereof. The targeting polypeptide may comprise an anti-FRalpha antibody or fragment thereof. The targeting polypeptide may comprise an anti-GPC3 antibody or fragment thereof. The targeting polypeptide may comprise an anti-SLAMf7 antibody or fragment thereof. The targeting polypeptide may comprise an anti-TNFRSF10B antibody or fragment thereof. The targeting polypeptide may comprise an anti-GPNMB antibody or fragment thereof. The targeting polypeptide may comprise an anti-VEGFR2 antibody or fragment thereof. The targeting polypeptide may comprise an anti-alpha4beta7/alphaEbeta7 antibody or fragment thereof. The targeting polypeptide may comprise an anti-CSPG4 antibody or fragment thereof. The targeting polypeptide may comprise an anti-CD80 antibody or fragment thereof. The targeting polypeptide may comprise an anti-CCR4 antibody or fragment thereof. The targeting polypeptide may comprise an anti-CD115 antibody or fragment thereof. The targeting polypeptide may comprise an anti-ENOX-2 antibody or fragment thereof. The targeting polypeptide may comprise an anti-CD56 antibody or fragment thereof. The targeting polypeptide may comprise an anti-huVH1-69 antibody or fragment thereof. The targeting polypeptide may comprise an anti-CD117 antibody or fragment thereof. The targeting polypeptide may comprise an anti-CD133 antibody or fragment thereof. The targeting polypeptide may comprise an anti-MUC1 antibody or fragment thereof. The targeting polypeptide may comprise an anti-MSLN antibody or fragment thereof. The targeting polypeptide may comprise an anti-ROR-2 antibody or fragment thereof. The targeting polypeptide may comprise an anti-IL13Ra2 antibody or fragment thereof. The targeting polypeptide may comprise an anti-EPHA2 antibody or fragment thereof. The targeting polypeptide may comprise an anti-EGFRvIII antibody or fragment thereof. The targeting polypeptide may comprise an anti-PSMA antibody or fragment thereof. The targeting polypeptide may comprise an anti-CEA antibody or fragment thereof. The targeting polypeptide may comprise an anti-Lewis Y antibody or fragment thereof. The targeting polypeptide may comprise an anti-PSCA antibody or fragment thereof. The targeting polypeptide may comprise an anti-MUC1 antibody or fragment thereof. The targeting polypeptide may comprise an anti-CD181L1CAM antibody or fragment thereof. The targeting polypeptide may comprise an anti-EpCAM antibody or fragment thereof. The targeting polypeptide may comprise an anti-ALK antibody or fragment thereof. The targeting polypeptide may comprise an anti-IGF-1R CD221 antibody or fragment thereof. The targeting polypeptide may comprise an anti-Nectin 4 antibody or fragment thereof. The targeting polypeptide may comprise an anti-FAP antibody or fragment thereof. The targeting polypeptide may comprise an anti-AXL antibody or fragment thereof. The targeting polypeptide may comprise an anti-CD138 antibody or fragment thereof. The targeting polypeptide may comprise an anti-CLDN6 antibody or fragment thereof. The targeting polypeptide may comprise an anti-Her4 antibody or fragment thereof. The targeting polypeptide may comprise an anti-Claudin 18.2 antibody or fragment thereof. The targeting polypeptide may comprise an anti-O-acetylated GD2 antibody or fragment thereof. The targeting polypeptide may comprise an anti-GD3 antibody or fragment thereof. The targeting polypeptide may comprise an anti-GM2 antibody or fragment thereof. The targeting polypeptide may comprise an anti-TM4SF1 antibody or fragment thereof. The targeting polypeptide may comprise an anti-CD147 antibody or fragment thereof. The targeting polypeptide may comprise an anti-CEACAM5 antibody or fragment thereof. The targeting polypeptide may comprise an anti-VEGFR-1 antibody or fragment thereof. The targeting polypeptide may comprise an anti-PDPN antibody or fragment thereof. The targeting polypeptide may comprise an anti-WT1 antibody or fragment thereof. The targeting polypeptide may comprise an anti-GPC2 antibody or fragment thereof. The targeting polypeptide may comprise an anti-FGFR4 antibody or fragment thereof. The targeting polypeptide may comprise an anti-EphB4 antibody or fragment thereof. The targeting polypeptide may comprise an anti-STEAP-1 antibody or fragment thereof. The targeting polypeptide may comprise an anti-STEAP-2 antibody or fragment thereof. The targeting polypeptide may comprise an anti-MUC1 antibody or fragment thereof. The targeting polypeptide may comprise an anti-chlorotoxin antibody or fragment thereof. The targeting polypeptide may comprise an anti-206 antibody or fragment thereof. The targeting polypeptide may comprise an anti-ILRAP1 antibody or fragment thereof. The targeting polypeptide may comprise an anti-MICA antibody or fragment thereof. The targeting polypeptide may comprise an anti-MAGE-A1 scTcR antibody or fragment thereof. The targeting polypeptide may comprise an anti-MAGE-A1 sTCR antibody or fragment thereof. The targeting polypeptide. The targeting polypeptide may comprise an anti-MICA antibody or fragment thereof. The targeting polypeptide may comprise an anti-TRBC1/2 antibody or fragment thereof. The targeting polypeptide may comprise an anti-B7-H7 antibody or fragment thereof. The targeting polypeptide may comprise an anti-CD34 antibody or fragment thereof. The targeting polypeptide may comprise an anti-CD7 antibody or fragment thereof. The targeting polypeptide may comprise an anti-TIM3 antibody or fragment thereof. The targeting polypeptide may comprise an anti-CD191 antibody or fragment thereof. The targeting polypeptide may comprise an anti-CD66b antibody or fragment thereof. The targeting polypeptide may comprise an anti-CD11b antibody or fragment thereof. The targeting polypeptide may comprise an anti-EMR2 antibody or fragment thereof. The targeting polypeptide may comprise an anti-MUC16 antibody or fragment thereof. The targeting polypeptide may comprise an anti-NYESO-1 HLA-A2 antibody or fragment thereof or a soluble TcR or variant thereof. The targeting polypeptide may comprise an anti-SURVIVIN HLA-A2 antibody or fragment thereof or a soluble TcR or variant thereof. The targeting polypeptide may comprise an anti-CD200 antibody or fragment thereof.

[0294] The targeting antibody or antibody fragment may be selected from any commercially available antibody. The targeting antibody or antibody fragment may be selected from trastuzumab (for binding to Her2), alemtuzumab (for binding CD52), bevacizumab (for binding VEGF-A), brentuximab (for binding CD30, gemtuzumab (for binding CD33), ipilimumab (for binding VTLA-4), ibritumomab (for binding CD20), panitumumab (for binding EGFR), cetuximab (for binding EGFR), rituximab (for binding CD20), and fragments thereof.

[0295] The targeting antibody or antibody fragment may be any referred to in Table 1, or an antigen binding fragment at least 80%, at least 81%, at least 82%, at least 83%, at least 84%, at least 85%, at least 86%, at least 87%, at least 88%, at least 89%, at least 90%, at least 91%, at least 92%, at least 93%, at least 94%, at least 95%, at least 96%, at least 97%, at least 98%, or at least 99% identical thereto.

[0296] The targeting moiety of the bridging molecule may target peptide MHC complexes and in such embodiments, the target moiety may be a soluble TcR molecule or single chain TcR molecule.

[0297] Non-limiting examples of the sequences of various targeting antibodies, or antigen binding fragments thereof, are provided herein in Table 1.

[0298] It will be well within the purview of the skilled person to be able to determine the appropriate design of a bridging molecule as described herein, including selection of the targeting moiety of the bridging molecule.

[0299] More specifically, the skilled person, having knowledge of the CAR requiring “redirection” as described herein would be able to select an alternative targeting moiety to which the CAR should be directed, to facilitate treatment of the cancer or disease requiring treatment.

[0300] As described herein, the targeting moiety may be for binding to any cell surface molecule on a target cell (such as a tumour-associated antigen expressed on a cancer cell). The skilled person can select an appropriate cell surface molecule depending on the disease (eg cancer) requiring treatment. For example, if the disease is a Her2+ cancer, then the skilled person may select a targeting moiety that is capable of specifically binding to Her2 on the cancer cell. Similarly, if the disease is a CD19+ cancer cell, then the skilled person may select a targeting moiety that is capable of specifically binding to CD19 on the cancer. The skilled person will be familiar with methods for determining the antigen expression profile of the cancer or condition to be treated in order to identify suitable surface molecules expressed on the target cell.

[0301] Having identified a suitable cell surface molecule (target antigen) on the target cell (eg: CD19, Her2, CLL-1, CD33, EGFRvIII, CD20, CD22, BCMA or any other tumour-associated antigen described herein or that may be selected for targeting), the skilled person can readily determine the sequence of a binding domain that can bind to said target antigen, including by reference to commercially available antibodies or to published literature describing antigen binding domains of known antibodies that bind to the antigen. The skilled person can then formulate the structure of a bridging molecule (fusion protein) as described herein, comprising a targeting moiety that binds to the cell surface molecule on a target cell. The composition of the remaining components of the bridging molecule (eg: the tumour-specific antigen epitope moiety) are described further herein.

[0302] Finally, the skilled person, having identified a suitable cell surface molecule (target antigen) on the target cell, and tumour-specific antigen epitope moiety in order to arrive at a bridging molecule of the invention, can readily determine, using routine techniques, whether the bridging molecule: a) binds to the target cell, b) binds to the CAR T cell and c) can successfully redirect the CAR T cell to the target cells to induce cell killing. Methods of determining binding to target antigens, and cytotoxicity are well known in the art. Non-limiting methods and various experimental protocols for determining binding to target cell, CAR T cell and induction of cell killing are described in detail herein in the Examples.

### Dysfunctional P2X₇ Receptor Epitope Moiety

[0303] The present invention contemplates the use of a tumour-specific antigen epitope moiety in the form of an epitope from dysfunctional P2X₇ receptor (ie wherein the tumour-specific antigen is dysfunctional P2X₇ receptor).

[0304] A dysfunctional P2X₇ receptor epitope moiety may be provided in the form of a dysfunctional P2X₇ receptor, or a fragment of a dysfunctional P2X₇ receptor, that has at least one of the three ATP binding sites that are formed at the interface between adjacent correctly packed monomers that are unable to bind ATP. Such receptors are unable to extend the opening of the non-selective calcium channels to apoptotic pores.

[0305] A range of peptide fragments of a dysfunctional P2X₇ receptor are known and discussed in PCT/AU2002/000061 (and in corresponding publications WO 2002/057306 and U.S. Pat. Nos. 7,326,415, 7,888,473, 7,531,171, 8,080,635, 8,399,617, 8,709,425, 9,663,584, or U.S. Pat. No. 10,450,380), PCT/AU2008/001364 (and in corresponding publications WO 2009/033233 and U.S. Pat. No. 8,440,186, 9,181,320, 9,944,701 or 10,597,45) and PCT/AU2009/000869 (and in corresponding publications WO 2010/000041 and U.S. Pat. No. 8,597,643, 9,328,155 or 10,238,716) the contents of all of which are incorporated in entirety. Exemplary peptides within these specifications that include epitopes contemplated for use in this invention are described below.

| PCT publication | Peptide sequence |
|---|---|
| WO 2002/057306 | GHNYTTRNILPGLNITC |
| | (SEQ ID NO: 2) (also referred to |
| | herein as the “E200” epitope) |
| WO 2009/033233 | KYYKENNVEKRTLIKVF |
| | (SEQ ID NO: 12) (also referred |
| | toherein as the “E300” epitope) |
| WO 2010/000041 | GHNYTTRNILPGAGAKYYKENNVEK |
| | (SEQ ID NO: 14) (also referred |
| | to herein as the “E200/E300” |
| | or “composite” epitope) |

[0306] In any embodiment, the amino acid sequence of the dysfunctional P2X₇ receptor epitope moiety of any bridging molecule described herein, comprises or consists of a sequence as set forth in any of SEQ ID Nos: 2 to 30, 168, and SEQ ID NOs: 365-400, or sequences at least 80%, at least 81%, at least 82%, at least 83%, at least 84%, at least 85%, at least 86%, at least 87%, at least 88%, at least 89%, at least 90%, at least 91%, at least 92%, at least 93%, at least 94%, at least 95%, at least 96%, at least 97%, at least 98%, or at least 99%, identical thereto. Preferably, the dysfunctional P2X₇ receptor epitope moiety comprises at least the sequence of SEQ ID NO: 11.

[0307] The dysfunctional P2X₇ receptor epitope moiety may have any functional chemical group such as a carboxyl group, an active ester, an acetamide or maleimide capable of coupling to a targeting moiety as disclosed herein, for example an antibody or fragment thereof using NH₂ or SH groups for coupling thereto.

[0308] Various examples of dysfunctional P2X₇ receptor epitope moieties are described herein, particularly in Table 1. As is clear from Table 1, the minimum E200 sequence comprises at least the sequence of SEQ ID NO: 11. In preferred embodiments, the minimum E200 sequence comprises at least the sequence of SEQ ID NO: 2, or a variant thereof, such as the sequence of SEQ ID NO: 4.

[0309] In certain examples, the E200 epitope for inclusion in the bridging molecules of the invention, may comprise extensions in the N-terminal and/or C-terminal region. The extensions may be derived from the naturally occurring nfP2X7 receptor sequence, and may comprise extensions of at least 1 amino acid residue, at least 2 amino acid residues, at least 3, at least 4, at least 5 or more amino acid residues. For example, the E200 epitope defined in SEQ ID NO: 4 may comprise an N-terminal extension of the sequence DFP, which corresponds to the three amino acid residues immediately N terminal to the E200 sequence in SEQ ID NO: 1. Further, the E200 epitope defined in SEQ ID NO: 4 may comprise a C terminal extension, as depicted, for example in SEQ ID NO: 6 and 7. It will be appreciated that such N and C terminal extensions may serve to improve the efficacy of binding of the CAR-T cell to the epitope on the bridging molecule.

[0310] In any embodiment, the dysfunctional P2X₇ receptor epitope moiety is conjugated to the targeting moiety so as to enable sufficient accessibility for binding by an nfP2X₇ receptor CAR. Thus, while the minimum dysfunctional P2X₇ receptor epitope moiety sequence comprises the minimum E200 sequence at least the sequence of SEQ ID NO: 11, in preferred embodiments, the minimum E200 sequence comprises at least the sequence of SEQ ID NO: 2, or a variant thereof, such as the sequence of SEQ ID NO: 4, in addition to one or more linker or hinge regions for enabling binding by an nfP2X₇ receptor CAR. In certain embodiments, the total length of the dysfunctional P2X₇ receptor epitope moiety (including linker and hinge region) is at least 17 amino acids in length, or at least, 18, 19, 20, 21, 22, 23, 24, 25, 26, 27, 28, 29, 30, 31, 32, 33,34, 35, 36, 37, 38, 39, 40, 41, 42, 43, 44, 45, 45, 47, 48, 49, or 50 amino acids in length. Preferably the dysfunctional P2X₇ receptor epitope moiety is no more than about 100 amino acids in length, more preferably, no more than about 99, 98, 97, 96, 95, 94, 93, 92, 91, 90, 89, 88, 87, 86, 85, 84, 83, 82, 81, 80, 79, 78, 77, 76, 75, 74, 73, 72, 71, 70, 69, 68, 67, 66, 65, 64, 63, 62, 61, 60, 59, 58, 57, 56, 55, 54, 53, 52, 51 or 50 amino acids in length.

[0311] In the context of a bridging molecule for targeting CD19, preferably the dysfunctional P2X₇ receptor epitope moiety is no more than about 35 amino acids in length and at least 20 amino acids in length, preferably at least 21, 22, 23, 24, 25, or 26 amino acids in length.

[0312] In the context of a bridging molecule for targeting CD33, preferably the dysfunctional P2X₇ receptor epitope moiety is no more than about 45 amino acids in length and at least 20 amino acids in length, preferably at least 21, 22, 23, 24, 25, or 26 amino acids in length.

### EGFRvIII Epitope Moiety

[0313] In any embodiment, the amino acid sequence of the EGFRvIII epitope moiety of any bridging molecule described herein, comprises or consists of a sequence as set forth in any of SEQ ID Nos: 267, or sequences at least 80%, at least 81%, at least 82%, at least 83%, at least 84%, at least 85%, at least 86%, at least 87%, at least 88%, at least 89%, at least 90%, at least 91%, at least 92%, at least 93%, at least 94%, at least 95%, at least 96%, at least 97%, at least 98%, or at least 99%, identical thereto. Preferably, the EGFRvIII epitope moiety comprises at least the sequence of SEQ ID NO: 267.

### CLDN6 Epitope Moiety

[0314] In any embodiment, the amino acid sequence of the CLDN6 epitope moiety of any bridging molecule described herein, comprises or consists of a sequence as set forth in any of SEQ ID Nos: 273, 274 or 275, or sequences at least 80%, at least 81%, at least 82%, at least 83%, at least 84%, at least 85%, at least 86%, at least 87%, at least 88%, at least 89%, at least 90%, at least 91%, at least 92%, at least 93%, at least 94%, at least 95%, at least 96%, at least 97%, at least 98%, or at least 99%, identical thereto. Preferably, the CLDN6 epitope moiety comprises at least the sequence of SEQ ID NO: 273, 274 or 275.

### Exemplary Bridging Molecules

[0315] The present specification provides various non-limiting examples of tumour-specific antigen epitope moiety (e.g. dysfunctional P2X₇ receptor epitope moiety)/targeting moiety pairs.

[0316] Exemplary bridging molecules of the invention are described in Table 1. For those bridging molecules that are described in Table 1 that include a nfP2X₇ epitope moiety, the specification includes those bridges but with the nfP2X₇ epitope moiety substituted for a EGFRvIII or CLDN6 epitope moiety.

[0317] In examples where the bridging molecules comprise a targeting moiety for binding to CD19, the targeting moiety may comprise or consist of a heavy and paired light variable chain combination as set forth in SEQ ID NOs: 31 and 32; or 143 and 144 (heavy and light chain, respectively; or sequences at least 80%, at least 81%, at least 82%, at least 83%, at least 84%, at least 85%, at least 86%, at least 87%, at least 88%, at least 89%, at least 90%, at least 91%, at least 92%, at least 93%, at least 94%, at least 95%, at least 96%, at least 97%, at least 98%, or at least 99%, identical thereto.

[0318] In the above examples, the bridging molecules may comprise the tumour-specific antigen epitope moiety (e.g. dysfunctional P2X₇ receptor epitope moiety) conjugated to the heavy chain, or the tumour-specific antigen epitope moiety (e.g. dysfunctional P2X₇ receptor epitope moiety) conjugated to the light chain. Preferably, the tumour-specific antigen epitope moiety (e.g. dysfunctional P2X₇ receptor epitope moiety) is conjugated to the light chain of the target binding moiety.

[0319] In any embodiment wherein the bridging molecule comprises CD19-binding heavy/light chain pairs where the heavy chain comprises or consists of the dysfunctional P2X₇ receptor epitope moiety, the sequences of the variable sequences of the heavy and light chain pairs are preferably selected from: SEQ ID NOs: 33 and 32; 34 and 32, 37 and 32; 37 and 38; (heavy and light chain sequences recited, respectively) or sequences at least 80%, at least 81%, at least 82%, at least 83%, at least 84%, at least 85%, at least 86%, at least 87%, at least 88%, at least 89%, at least 90%, at least 91%, at least 92%, at least 93%, at least 94%, at least 95%, at least 96%, at least 97%, at least 98%, or at least 99%, identical thereto.

[0320] In any embodiment wherein the bridging molecule comprises CD19-binding heavy/light chain pairs where the light chain comprises or consists of the dysfunctional P2X₇ receptor epitope moiety, the sequences of the variable sequences of the heavy and light chain pairs are preferably selected from: SEQ ID NOs: 31 and 35; 31 and 36; 39 and 31; 52 and 51; 143 and 145; 143 and 146; 143 and 147; 143 and 148; 143 and 149; 143 and 150; 143 and 151; 143 and 152; 143 and 153; 143 and 154; 143 and 155; 143 and 156; 143 and 157; 143 and 158; 143 and 159; 143 and 160; 143 and 161; 143 and 162; 143 and 163; or 143 and 164 (heavy and light chain sequences recited, respectively) or sequences at least 80%, at least 81%, at least 82%, at least 83%, at least 84%, at least 85%, at least 86%, at least 87%, at least 88%, at least 89%, at least 90%, at least 91%, at least 92%, at least 93%, at least 94%, at least 95%, at least 96%, at least 97%, at least 98%, or at least 99%, identical thereto. In another embodiment wherein the bridging molecule comprises CD19-binding heavy/light chain pairs where the light chain is any one of the light chains above and a heavy chain selected from SEQ ID NO: 141 or 142.

[0321] The targeting moiety may be in the form of an scFv comprising a heavy and a light chain.

[0322] In any embodiment, a CD19-binding scFv for use in the bridging molecules of the invention may be one having a sequence as set forth in SEQ ID NOs: 40 or 41 or sequences at least 80%, at least 81%, at least 82%, at least 83%, at least 84%, at least 85%, at least 86%, at least 87%, at least 88%, at least 89%, at least 90%, at least 91%, at least 92%, at least 93%, at least 94%, at least 95%, at least 96%, at least 97%, at least 98%, or at least 99%, identical thereto. It will be appreciated that in the context of an scFv, the dysfunctional P2X₇ receptor epitope moiety may be conjugated to the light chain of the scFv, such as in any of SEQ ID NOs: 42, 43, 46, 48, or to the heavy chain of the scFv, such as in any of SEQ ID NOs: 44, 45, 47, 49, 50 or sequences at least 80%, at least 81%, at least 82%, at least 83%, at least 84%, at least 85%, at least 86%, at least 87%, at least 88%, at least 89%, at least 90%, at least 91%, at least 92%, at least 93%, at least 94%, at least 95%, at least 96%, at least 97%, at least 98%, or at least 99%, identical thereto.

[0323] In preferred embodiments, the bridging molecule for binding to CD19 comprises a targeting moiety comprising an antigen binding domain for specifically binding to CD19, preferably as described herein (more preferably, comprising the amino acid sequence as set forth in SEQ ID NOs: 52/143 or 143/144 (heavy and light chains respectively) or a sequence at least 80%, at least 81%, at least 82%, at least 83%, at least 84%, at least 85%, at least 86%, at least 87%, at least 88%, at least 89%, at least 90%, at least 91%, at least 92%, at least 93%, at least 94%, at least 95%, at least 96%, at least 97%, at least 98%, or at least 99%, identical thereto) and comprises a tumour-specific antigen epitope moiety comprising or consisting of the amino acid sequence set forth in any of SEQ ID NOs: 365, 371, 377, 383, 389, and 395.

[0324] In any embodiment, a bridging molecule for binding to CD20 may comprise or consist of the sequences set forth in SEQ ID NOs: 53 and 54, or in 55 and 56 (light and heavy chain sequences recited, respectively) or a sequence at least 80%, at least 81%, at least 82%, at least 83%, at least 84%, at least 85%, at least 86%, at least 87%, at least 88%, at least 89%, at least 90%, at least 91%, at least 92%, at least 93%, at least 94%, at least 95%, at least 96%, at least 97%, at least 98%, or at least 99%, identical thereto.

[0325] In any embodiment, a bridging molecule for binding to CD22 may comprise or consist of the sequences set forth in SEQ ID NOs: 57 and 58; or in 59 and 60 (light and heavy chain sequences recited, respectively) or a sequence at least 80%, at least 81%, at least 82%, at least 83%, at least 84%, at least 85%, at least 86%, at least 87%, at least 88%, at least 89%, at least 90%, at least 91%, at least 92%, at least 93%, at least 94%, at least 95%, at least 96%, at least 97%, at least 98%, or at least 99%, identical thereto.

[0326] In any embodiment, a bridging molecule for binding to CD79B may comprise or consist of the sequences set forth in SEQ ID NOs: 61 and 62, (light and heavy chain sequences recited, respectively) or a sequence at least 80%, at least 81%, at least 82%, at least 83%, at least 84%, at least 85%, at least 86%, at least 87%, at least 88%, at least 89%, at least 90%, at least 91%, at least 92%, at least 93%, at least 94%, at least 95%, at least 96%, at least 97%, at least 98%, or at least 99%, identical thereto.

[0327] In any embodiment, a bridging molecule for binding to CD37 may comprise or consist of the sequences set forth in SEQ ID NOs: 63 and 64, (light and heavy chain sequences recited, respectively) or a sequence at least 80%, at least 81%, at least 82%, at least 83%, at least 84%, at least 85%, at least 86%, at least 87%, at least 88%, at least 89%, at least 90%, at least 91%, at least 92%, at least 93%, at least 94%, at least 95%, at least 96%, at least 97%, at least 98%, or at least 99%, identical thereto.

[0328] In any embodiment, a bridging molecule for binding to CD38 may comprise or consist of the sequences set forth in SEQ ID NOs: 65 and 66, (light and heavy chain sequences recited, respectively) or a sequence at least 80%, at least 81%, at least 82%, at least 83%, at least 84%, at least 85%, at least 86%, at least 87%, at least 88%, at least 89%, at least 90%, at least 91%, at least 92%, at least 93%, at least 94%, at least 95%, at least 96%, at least 97%, at least 98%, or at least 99%, identical thereto.

[0329] In any embodiment, a bridging molecule for binding to CD70 may comprise or consist of the sequences set forth in SEQ ID NOs: 67 and 68, (light and heavy chain sequences recited, respectively) or a sequence at least 80%, at least 81%, at least 82%, at least 83%, at least 84%, at least 85%, at least 86%, at least 87%, at least 88%, at least 89%, at least 90%, at least 91%, at least 92%, at least 93%, at least 94%, at least 95%, at least 96%, at least 97%, at least 98%, or at least 99%, identical thereto.

[0330] In any embodiment, a bridging molecule for binding to CD30 may comprise or consist of the sequences set forth in SEQ ID NOs: 39 and 70, (light and heavy chain sequences recited, respectively) or a sequence at least 80%, at least 81%, at least 82%, at least 83%, at least 84%, at least 85%, at least 86%, at least 87%, at least 88%, at least 89%, at least 90%, at least 91%, at least 92%, at least 93%, at least 94%, at least 95%, at least 96%, at least 97%, at least 98%, or at least 99%, identical thereto.

[0331] In any embodiment, a bridging molecule for binding to CD33 may comprise or consist of the sequences set forth in SEQ ID NOs: 71 and 72 or 73 and 74, (light and heavy chain sequences recited, respectively) or a sequence at least 80%, at least 81%, at least 82%, at least 83%, at least 84%, at least 85%, at least 86%, at least 87%, at least 88%, at least 89%, at least 90%, at least 91%, at least 92%, at least 93%, at least 94%, at least 95%, at least 96%, at least 97%, at least 98%, or at least 99%, identical thereto.

[0332] In preferred embodiments, the bridging molecule for binding to CD33 comprises a targeting moiety comprising an antigen binding domain for specifically binding to CD33, preferably as described herein (more preferably, comprising the amino acid sequence as set forth in SEQ ID NOs: 73 and 72 or 74, (light and heavy chain sequences recited, respectively) or a sequence at least 80%, at least 81%, at least 82%, at least 83%, at least 84%, at least 85%, at least 86%, at least 87%, at least 88%, at least 89%, at least 90%, at least 91%, at least 92%, at least 93%, at least 94%, at least 95%, at least 96%, at least 97%, at least 98%, or at least 99%, identical thereto), and comprises a tumour-specific antigen epitope moiety comprising or consisting of the amino acid sequence set forth in any of SEQ ID NOs: 365, 373, 377, 388, 390, and 395.

[0333] In any embodiment, a bridging molecule for binding to Her2 may comprise or consist of the sequences set forth in SEQ ID NOs: 75 and 75; or 77 and 78, (light and heavy chain sequences recited, respectively) or a sequence at least 80%, at least 81%, at least 82%, at least 83%, at least 84%, at least 85%, at least 86%, at least 87%, at least 88%, at least 89%, at least 90%, at least 91%, at least 92%, at least 93%, at least 94%, at least 95%, at least 96%, at least 97%, at least 98%, or at least 99%, identical thereto.

[0334] In any embodiment, a bridging molecule for binding to EGFR may comprise or consist of the sequences set forth in SEQ ID NOs: 79 and 80 or 81 and 82 or 83 and 84, (light and heavy chain sequences recited, respectively) or a sequence at least 80%, at least 81%, at least 82%, at least 83%, at least 84%, at least 85%, at least 86%, at least 87%, at least 88%, at least 89%, at least 90%, at least 91%, at least 92%, at least 93%, at least 94%, at least 95%, at least 96%, at least 97%, at least 98%, or at least 99%, identical thereto.

[0335] In any embodiment, a bridging molecule for binding to CD276 may comprise or consist of the sequences set forth in SEQ ID NOs: 85 and 86, (light and heavy chain sequences recited, respectively) or a sequence at least 80%, at least 81%, at least 82%, at least 83%, at least 84%, at least 85%, at least 86%, at least 87%, at least 88%, at least 89%, at least 90%, at least 91%, at least 92%, at least 93%, at least 94%, at least 95%, at least 96%, at least 97%, at least 98%, or at least 99%, identical thereto.

[0336] In any embodiment, a bridging molecule for binding to GD2 may comprise or consist of the sequences set forth in SEQ ID NOs: 87 and 88, (light and heavy chain sequences recited, respectively) or a sequence at least 80%, at least 81%, at least 82%, at least 83%, at least 84%, at least 85%, at least 86%, at least 87%, at least 88%, at least 89%, at least 90%, at least 91%, at least 92%, at least 93%, at least 94%, at least 95%, at least 96%, at least 97%, at least 98%, or at least 99%, identical thereto.

[0337] In any embodiment, a bridging molecule for binding to BCMA may comprise or consist of the sequences set forth in SEQ ID NOs: 89 and 90, (light and heavy chain sequences recited, respectively) or a sequence at least 80%, at least 81%, at least 82%, at least 83%, at least 84%, at least 85%, at least 86%, at least 87%, at least 88%, at least 89%, at least 90%, at least 91%, at least 92%, at least 93%, at least 94%, at least 95%, at least 96%, at least 97%, at least 98%, or at least 99%, identical thereto.

[0338] In any embodiment, a bridging molecule for binding to CD371 may comprise or consist of the sequences set forth in SEQ ID NOs: 91 and 92, (light and heavy chain sequences recited, respectively) or a sequence at least 80%, at least 81%, at least 82%, at least 83%, at least 84%, at least 85%, at least 86%, at least 87%, at least 88%, at least 89%, at least 90%, at least 91%, at least 92%, at least 93%, at least 94%, at least 95%, at least 96%, at least 97%, at least 98%, or at least 99%, identical thereto.

[0339] In any embodiment, a bridging molecule for binding to CD135 may comprise or consist of the sequences set forth in SEQ ID NOs: 93 and 94, (light and heavy chain sequences recited, respectively) or a sequence at least 80%, at least 81%, at least 82%, at least 83%, at least 84%, at least 85%, at least 86%, at least 87%, at least 88%, at least 89%, at least 90%, at least 91%, at least 92%, at least 93%, at least 94%, at least 95%, at least 96%, at least 97%, at least 98%, or at least 99%, identical thereto.

[0340] In any embodiment, a bridging molecule for binding to CD123 may comprise or consist of the sequences set forth in SEQ ID NOs: 95 and 95, (light and heavy chain sequences recited, respectively) or a sequence at least 80%, at least 81%, at least 82%, at least 83%, at least 84%, at least 85%, at least 86%, at least 87%, at least 88%, at least 89%, at least 90%, at least 91%, at least 92%, at least 93%, at least 94%, at least 95%, at least 96%, at least 97%, at least 98%, or at least 99%, identical thereto.

[0341] In any embodiment, a bridging molecule for binding to CD105 may comprise or consist of the sequences set forth in SEQ ID NOs: 97 and 98, (light and heavy chain sequences recited, respectively) or a sequence at least 80%, at least 81%, at least 82%, at least 83%, at least 84%, at least 85%, at least 86%, at least 87%, at least 88%, at least 89%, at least 90%, at least 91%, at least 92%, at least 93%, at least 94%, at least 95%, at least 96%, at least 97%, at least 98%, or at least 99%, identical thereto.

[0342] In any embodiment, a bridging molecule for binding to ROR-1 may comprise or consist of the sequences set forth in SEQ ID NOs: 99 and 100, (light and heavy chain sequences recited, respectively) or a sequence at least 80%, at least 81%, at least 82%, at least 83%, at least 84%, at least 85%, at least 86%, at least 87%, at least 88%, at least 89%, at least 90%, at least 91%, at least 92%, at least 93%, at least 94%, at least 95%, at least 96%, at least 97%, at least 98%, or at least 99%, identical thereto.

[0343] In any embodiment, a bridging molecule for binding to PD-L1 may comprise or consist of the sequences set forth in SEQ ID NOs: 101 and 102, (light and heavy chain sequences recited, respectively) or a sequence at least 80%, at least 81%, at least 82%, at least 83%, at least 84%, at least 85%, at least 86%, at least 87%, at least 88%, at least 89%, at least 90%, at least 91%, at least 92%, at least 93%, at least 94%, at least 95%, at least 96%, at least 97%, at least 98%, or at least 99%, identical thereto.

[0344] In any embodiment, a bridging molecule for binding to MET-R may comprise or consist of the sequences set forth in SEQ ID NOs: 103 ad 104, (light and heavy chain sequences recited, respectively) or a sequence at least 80%, at least 81%, at least 82%, at least 83%, at least 84%, at least 85%, at least 86%, at least 87%, at least 88%, at least 89%, at least 90%, at least 91%, at least 92%, at least 93%, at least 94%, at least 95%, at least 96%, at least 97%, at least 98%, or at least 99%, identical thereto.

[0345] In any embodiment, a bridging molecule for binding to PDGFRalpha may comprise or consist of the sequences set forth in SEQ ID NOs: 105 and 106 or 107 and 108 (light and heavy chain sequences recited, respectively) or a sequence at least 80%, at least 81%, at least 82%, at least 83%, at least 84%, at least 85%, at least 86%, at least 87%, at least 88%, at least 89%, at least 90%, at least 91%, at least 92%, at least 93%, at least 94%, at least 95%, at least 96%, at least 97%, at least 98%, or at least 99%, identical thereto.

[0346] In any embodiment, a bridging molecule for binding to Her3 may comprise or consist of the sequences set forth in SEQ ID NOs: 109 and 110, (light and heavy chain sequences recited, respectively) or a sequence at least 80%, at least 81%, at least 82%, at least 83%, at least 84%, at least 85%, at least 86%, at least 87%, at least 88%, at least 89%, at least 90%, at least 91%, at least 92%, at least 93%, at least 94%, at least 95%, at least 96%, at least 97%, at least 98%, or at least 99%, identical thereto.

[0347] In any embodiment, a bridging molecule for binding to FRalpha may comprise or consist of the sequences set forth in SEQ ID NOs: 111 and 112, (light and heavy chain sequences recited, respectively) or a sequence at least 80%, at least 81%, at least 82%, at least 83%, at least 84%, at least 85%, at least 86%, at least 87%, at least 88%, at least 89%, at least 90%, at least 91%, at least 92%, at least 93%, at least 94%, at least 95%, at least 96%, at least 97%, at least 98%, or at least 99%, identical thereto.

[0348] In any embodiment, a bridging molecule for binding to CGPC3 may comprise or consist of the sequences set forth in SEQ ID NOs: 113 and 114, (light and heavy chain sequences recited, respectively) or a sequence at least 80%, at least 81%, at least 82%, at least 83%, at least 84%, at least 85%, at least 86%, at least 87%, at least 88%, at least 89%, at least 90%, at least 91%, at least 92%, at least 93%, at least 94%, at least 95%, at least 96%, at least 97%, at least 98%, or at least 99%, identical thereto.

[0349] In any embodiment, a bridging molecule for binding to SLAMF7 may comprise or consist of the sequences set forth in SEQ ID NOs: 115 and 116, (light and heavy chain sequences recited, respectively) or a sequence at least 80%, at least 81%, at least 82%, at least 83%, at least 84%, at least 85%, at least 86%, at least 87%, at least 88%, at least 89%, at least 90%, at least 91%, at least 92%, at least 93%, at least 94%, at least 95%, at least 96%, at least 97%, at least 98%, or at least 99%, identical thereto.

[0350] In any embodiment, a bridging molecule for binding to TNFRSF10B may comprise or consist of the sequences set forth in SEQ ID NOs: 117 and 118, (light and heavy chain sequences recited, respectively) or a sequence at least 80%, at least 81%, at least 82%, at least 83%, at least 84%, at least 85%, at least 86%, at least 87%, at least 88%, at least 89%, at least 90%, at least 91%, at least 92%, at least 93%, at least 94%, at least 95%, at least 96%, at least 97%, at least 98%, or at least 99%, identical thereto.

[0351] In any embodiment, a bridging molecule for binding to GPNMB may comprise or consist of the sequences set forth in SEQ ID NOs: 119 and 120, (light and heavy chain sequences recited, respectively) or a sequence at least 80%, at least 81%, at least 82%, at least 83%, at least 84%, at least 85%, at least 86%, at least 87%, at least 88%, at least 89%, at least 90%, at least 91%, at least 92%, at least 93%, at least 94%, at least 95%, at least 96%, at least 97%, at least 98%, or at least 99%, identical thereto.

[0352] In any embodiment, a bridging molecule for binding to VEGFR2 may comprise or consist of the sequences set forth in SEQ ID NOs: 121 and 122, (light and heavy chain sequences recited, respectively) or a sequence at least 80%, at least 81%, at least 82%, at least 83%, at least 84%, at least 85%, at least 86%, at least 87%, at least 88%, at least 89%, at least 90%, at least 91%, at least 92%, at least 93%, at least 94%, at least 95%, at least 96%, at least 97%, at least 98%, or at least 99%, identical thereto.

[0353] In any embodiment, a bridging molecule for binding to α4β7 and/or Eβ7 may comprise or consist of the sequences set forth in SEQ ID NOs: 123 and 124; or 125 and 126, (light and heavy chain sequences recited, respectively) or a sequence at least 80%, at least 81%, at least 82%, at least 83%, at least 84%, at least 85%, at least 86%, at least 87%, at least 88%, at least 89%, at least 90%, at least 91%, at least 92%, at least 93%, at least 94%, at least 95%, at least 96%, at least 97%, at least 98%, or at least 99%, identical thereto.

[0354] In any embodiment, a bridging molecule for binding to CSPG4 may comprise or consist of the sequences set forth in SEQ ID NOs: 127 and 128, (light and heavy chain sequences recited, respectively) or a sequence at least 80%, at least 81%, at least 82%, at least 83%, at least 84%, at least 85%, at least 86%, at least 87%, at least 88%, at least 89%, at least 90%, at least 91%, at least 92%, at least 93%, at least 94%, at least 95%, at least 96%, at least 97%, at least 98%, or at least 99%, identical thereto.

[0355] In any embodiment, a bridging molecule for binding to CD80 may comprise or consist of the sequences set forth in SEQ ID NOs: 129 and 130, (light and heavy chain sequences recited, respectively) or a sequence at least 80%, at least 81%, at least 82%, at least 83%, at least 84%, at least 85%, at least 86%, at least 87%, at least 88%, at least 89%, at least 90%, at least 91%, at least 92%, at least 93%, at least 94%, at least 95%, at least 96%, at least 97%, at least 98%, or at least 99%, identical thereto.

[0356] In any embodiment, a bridging molecule for binding to CCR4 may comprise or consist of the sequences set forth in SEQ ID NOs: 131 and 132, (light and heavy chain sequences recited, respectively) or a sequence at least 80%, at least 81%, at least 82%, at least 83%, at least 84%, at least 85%, at least 86%, at least 87%, at least 88%, at least 89%, at least 90%, at least 91%, at least 92%, at least 93%, at least 94%, at least 95%, at least 96%, at least 97%, at least 98%, or at least 99%, identical thereto.

[0357] In any embodiment, a bridging molecule for binding to CD115 may comprise or consist of the sequences set forth in SEQ ID NOs: 133 and 134, (light and heavy chain sequences recited, respectively) or a sequence at least 80%, at least 81%, at least 82%, at least 83%, at least 84%, at least 85%, at least 86%, at least 87%, at least 88%, at least 89%, at least 90%, at least 91%, at least 92%, at least 93%, at least 94%, at least 95%, at least 96%, at least 97%, at least 98%, or at least 99%, identical thereto.

[0358] In any embodiment, a bridging molecule for binding to ENOX-2 may comprise or consist of the sequences set forth in SEQ ID NOs: 135 and 136, (light and heavy chain sequences recited, respectively) or a sequence at least 80%, at least 81%, at least 82%, at least 83%, at least 84%, at least 85%, at least 86%, at least 87%, at least 88%, at least 89%, at least 90%, at least 91%, at least 92%, at least 93%, at least 94%, at least 95%, at least 96%, at least 97%, at least 98%, or at least 99%, identical thereto.

[0359] In any embodiment, a bridging molecule for binding to CD56 may comprise or consist of the sequences set forth in SEQ ID NOs: 137 and 138, (light and heavy chain sequences recited, respectively) or a sequence at least 80%, at least 81%, at least 82%, at least 83%, at least 84%, at least 85%, at least 86%, at least 87%, at least 88%, at least 89%, at least 90%, at least 91%, at least 92%, at least 93%, at least 94%, at least 95%, at least 96%, at least 97%, at least 98%, or at least 99%, identical thereto.

[0360] In any embodiment, a bridging molecule for binding to huVH1-69 may comprise or consist of the sequences set forth in SEQ ID NOs: 139 and 140, (light and heavy chain sequences recited, respectively) or a sequence at least 80%, at least 81%, at least 82%, at least 83%, at least 84%, at least 85%, at least 86%, at least 87%, at least 88%, at least 89%, at least 90%, at least 91%, at least 92%, at least 93%, at least 94%, at least 95%, at least 96%, at least 97%, at least 98%, or at least 99%, identical thereto.

[0361] In any embodiment, a bridging molecule for binding to CD117 may comprise or consist of the sequences set forth in SEQ ID NOs: 169 and 170, (light and heavy chain sequences recited, respectively) or a sequence at least 80%, at least 81%, at least 82%, at least 83%, at least 84%, at least 85%, at least 86%, at least 87%, at least 88%, at least 89%, at least 90%, at least 91%, at least 92%, at least 93%, at least 94%, at least 95%, at least 96%, at least 97%, at least 98%, or at least 99%, identical thereto.

[0362] In any embodiment, a bridging molecule for binding to CD133 may comprise or consist of the sequences set forth in SEQ ID NOs: 171 and 172, (light and heavy chain sequences recited, respectively) or a sequence at least 80%, at least 81%, at least 82%, at least 83%, at least 84%, at least 85%, at least 86%, at least 87%, at least 88%, at least 89%, at least 90%, at least 91%, at least 92%, at least 93%, at least 94%, at least 95%, at least 96%, at least 97%, at least 98%, or at least 99%, identical thereto.

[0363] In any embodiment, a bridging molecule for binding to MUC1 may comprise or consist of the sequences set forth in SEQ ID NOs: 173 and 174, (light and heavy chain sequences recited, respectively) or a sequence at least 80%, at least 81%, at least 82%, at least 83%, at least 84%, at least 85%, at least 86%, at least 87%, at least 88%, at least 89%, at least 90%, at least 91%, at least 92%, at least 93%, at least 94%, at least 95%, at least 96%, at least 97%, at least 98%, or at least 99%, identical thereto.

[0364] In any embodiment, a bridging molecule for binding to mesothelin may comprise or consist of the sequences set forth in SEQ ID NOs: 175 and 176, (light and heavy chain sequences recited, respectively) or a sequence at least 80%, at least 81%, at least 82%, at least 83%, at least 84%, at least 85%, at least 86%, at least 87%, at least 88%, at least 89%, at least 90%, at least 91%, at least 92%, at least 93%, at least 94%, at least 95%, at least 96%, at least 97%, at least 98%, or at least 99%, identical thereto.

[0365] In any embodiment, a bridging molecule for binding to ROR2 may comprise or consist of the sequences set forth in SEQ ID NOs: 177 and 178, (light and heavy chain sequences recited, respectively) or a sequence at least 80%, at least 81%, at least 82%, at least 83%, at least 84%, at least 85%, at least 86%, at least 87%, at least 88%, at least 89%, at least 90%, at least 91%, at least 92%, at least 93%, at least 94%, at least 95%, at least 96%, at least 97%, at least 98%, or at least 99%, identical thereto.

[0366] In any embodiment, a bridging molecule for binding to IL13Ra2 may comprise or consist of the sequences set forth in SEQ ID NOs: 179 and 180, (light and heavy chain sequences recited, respectively) or a sequence at least 80%, at least 81%, at least 82%, at least 83%, at least 84%, at least 85%, at least 86%, at least 87%, at least 88%, at least 89%, at least 90%, at least 91%, at least 92%, at least 93%, at least 94%, at least 95%, at least 96%, at least 97%, at least 98%, or at least 99%, identical thereto.

[0367] In any embodiment, a bridging molecule for binding to IL13Ra2 may comprise or consist of the sequences set forth in SEQ ID NOs: 181, or a sequence at least 80%, at least 81%, at least 82%, at least 83%, at least 84%, at least 85%, at least 86%, at least 87%, at least 88%, at least 89%, at least 90%, at least 91%, at least 92%, at least 93%, at least 94%, at least 95%, at least 96%, at least 97%, at least 98%, or at least 99%, identical thereto.

[0368] In any embodiment, a bridging molecule for binding to EPHA2 may comprise or consist of the sequences set forth in SEQ ID NOs: 182 and 183, (light and heavy chain sequences recited, respectively) or a sequence at least 80%, at least 81%, at least 82%, at least 83%, at least 84%, at least 85%, at least 86%, at least 87%, at least 88%, at least 89%, at least 90%, at least 91%, at least 92%, at least 93%, at least 94%, at least 95%, at least 96%, at least 97%, at least 98%, or at least 99%, identical thereto.

[0369] In any embodiment, a bridging molecule for binding to EGFRvIII may comprise or consist of the sequences set forth in SEQ ID NOs: 184 and 185, (light and heavy chain sequences recited, respectively) or a sequence at least 80%, at least 81%, at least 82%, at least 83%, at least 84%, at least 85%, at least 86%, at least 87%, at least 88%, at least 89%, at least 90%, at least 91%, at least 92%, at least 93%, at least 94%, at least 95%, at least 96%, at least 97%, at least 98%, or at least 99%, identical thereto.

[0370] In any embodiment, a bridging molecule for binding to PSMA may comprise or consist of the sequences set forth in SEQ ID NOs: 186 and 187, (light and heavy chain sequences recited, respectively) or a sequence at least 80%, at least 81%, at least 82%, at least 83%, at least 84%, at least 85%, at least 86%, at least 87%, at least 88%, at least 89%, at least 90%, at least 91%, at least 92%, at least 93%, at least 94%, at least 95%, at least 96%, at least 97%, at least 98%, or at least 99%, identical thereto.

[0371] In any embodiment, a bridging molecule for binding to CEA may comprise or consist of the sequences set forth in SEQ ID NOs: 188 and 189, (light and heavy chain sequences recited, respectively) or a sequence at least 80%, at least 81%, at least 82%, at least 83%, at least 84%, at least 85%, at least 86%, at least 87%, at least 88%, at least 89%, at least 90%, at least 91%, at least 92%, at least 93%, at least 94%, at least 95%, at least 96%, at least 97%, at least 98%, or at least 99%, identical thereto.

[0372] In any embodiment, a bridging molecule for binding to PSCA may comprise or consist of the sequences set forth in SEQ ID NOs: 190 and 191, (light and heavy chain sequences recited, respectively) or a sequence at least 80%, at least 81%, at least 82%, at least 83%, at least 84%, at least 85%, at least 86%, at least 87%, at least 88%, at least 89%, at least 90%, at least 91%, at least 92%, at least 93%, at least 94%, at least 95%, at least 96%, at least 97%, at least 98%, or at least 99%, identical thereto.

[0373] In any embodiment, a bridging molecule for binding to Lewis Y may comprise or consist of the sequences set forth in SEQ ID NOs: 192 and 193, (light and heavy chain sequences recited, respectively) or a sequence at least 80%, at least 81%, at least 82%, at least 83%, at least 84%, at least 85%, at least 86%, at least 87%, at least 88%, at least 89%, at least 90%, at least 91%, at least 92%, at least 93%, at least 94%, at least 95%, at least 96%, at least 97%, at least 98%, or at least 99%, identical thereto.

[0374] In any embodiment, a bridging molecule for binding to CD171 L1CAM may comprise or consist of the sequences set forth in SEQ ID NOs: 194 and 195, (light and heavy chain sequences recited, respectively) or a sequence at least 80%, at least 81%, at least 82%, at least 83%, at least 84%, at least 85%, at least 86%, at least 87%, at least 88%, at least 89%, at least 90%, at least 91%, at least 92%, at least 93%, at least 94%, at least 95%, at least 96%, at least 97%, at least 98%, or at least 99%, identical thereto.

[0375] In any embodiment, a bridging molecule for binding to EpCAM may comprise or consist of the sequences set forth in SEQ ID NOs: 196 and 197, (light and heavy chain sequences recited, respectively) or a sequence at least 80%, at least 81%, at least 82%, at least 83%, at least 84%, at least 85%, at least 86%, at least 87%, at least 88%, at least 89%, at least 90%, at least 91%, at least 92%, at least 93%, at least 94%, at least 95%, at least 96%, at least 97%, at least 98%, or at least 99%, identical thereto.

[0376] In any embodiment, a bridging molecule for binding to ALK may comprise or consist of the sequences set forth in SEQ ID NOs: 198 and 199, (light and heavy chain sequences recited, respectively) or a sequence at least 80%, at least 81%, at least 82%, at least 83%, at least 84%, at least 85%, at least 86%, at least 87%, at least 88%, at least 89%, at least 90%, at least 91%, at least 92%, at least 93%, at least 94%, at least 95%, at least 96%, at least 97%, at least 98%, or at least 99%, identical thereto.

[0377] In any embodiment, a bridging molecule for binding to IGF-1R CD221 may comprise or consist of the sequences set forth in SEQ ID NOs: 200 and 201, (light and heavy chain sequences recited, respectively) or a sequence at least 80%, at least 81%, at least 82%, at least 83%, at least 84%, at least 85%, at least 86%, at least 87%, at least 88%, at least 89%, at least 90%, at least 91%, at least 92%, at least 93%, at least 94%, at least 95%, at least 96%, at least 97%, at least 98%, or at least 99%, identical thereto.

[0378] In any embodiment, a bridging molecule for binding to Nectin 4 may comprise or consist of the sequences set forth in SEQ ID NOs: 202 and 203, (light and heavy chain sequences recited, respectively) or a sequence at least 80%, at least 81%, at least 82%, at least 83%, at least 84%, at least 85%, at least 86%, at least 87%, at least 88%, at least 89%, at least 90%, at least 91%, at least 92%, at least 93%, at least 94%, at least 95%, at least 96%, at least 97%, at least 98%, or at least 99%, identical thereto.

[0379] In any embodiment, a bridging molecule for binding to FAP may comprise or consist of the sequences set forth in SEQ ID NOs: 204 and 205, (light and heavy chain sequences recited, respectively) or a sequence at least 80%, at least 81%, at least 82%, at least 83%, at least 84%, at least 85%, at least 86%, at least 87%, at least 88%, at least 89%, at least 90%, at least 91%, at least 92%, at least 93%, at least 94%, at least 95%, at least 96%, at least 97%, at least 98%, or at least 99%, identical thereto.

[0380] In any embodiment, a bridging molecule for binding to AXL may comprise or consist of the sequences set forth in SEQ ID NOs: 206 and 207, (light and heavy chain sequences recited, respectively) or a sequence at least 80%, at least 81%, at least 82%, at least 83%, at least 84%, at least 85%, at least 86%, at least 87%, at least 88%, at least 89%, at least 90%, at least 91%, at least 92%, at least 93%, at least 94%, at least 95%, at least 96%, at least 97%, at least 98%, or at least 99%, identical thereto.

[0381] In any embodiment, a bridging molecule for binding to CD138 may comprise or consist of the sequences set forth in SEQ ID NOs: 208 and 209, (light and heavy chain sequences recited, respectively) or a sequence at least 80%, at least 81%, at least 82%, at least 83%, at least 84%, at least 85%, at least 86%, at least 87%, at least 88%, at least 89%, at least 90%, at least 91%, at least 92%, at least 93%, at least 94%, at least 95%, at least 96%, at least 97%, at least 98%, or at least 99%, identical thereto.

[0382] In any embodiment, a bridging molecule for binding to CLDN6 may comprise or consist of the sequences set forth in SEQ ID NOs: 210 and 211, (light and heavy chain sequences recited, respectively) or a sequence at least 80%, at least 81%, at least 82%, at least 83%, at least 84%, at least 85%, at least 86%, at least 87%, at least 88%, at least 89%, at least 90%, at least 91%, at least 92%, at least 93%, at least 94%, at least 95%, at least 96%, at least 97%, at least 98%, or at least 99%, identical thereto.

[0383] In any embodiment, a bridging molecule for binding to Her4 may comprise or consist of the sequences set forth in SEQ ID NOs: 212 and 213, (light and heavy chain sequences recited, respectively) or a sequence at least 80%, at least 81%, at least 82%, at least 83%, at least 84%, at least 85%, at least 86%, at least 87%, at least 88%, at least 89%, at least 90%, at least 91%, at least 92%, at least 93%, at least 94%, at least 95%, at least 96%, at least 97%, at least 98%, or at least 99%, identical thereto.

[0384] In any embodiment, a bridging molecule for binding to Claudin 18.2 may comprise or consist of the sequences set forth in SEQ ID NOs: 214 and 215, (light and heavy chain sequences recited, respectively) or a sequence at least 80%, at least 81%, at least 82%, at least 83%, at least 84%, at least 85%, at least 86%, at least 87%, at least 88%, at least 89%, at least 90%, at least 91%, at least 92%, at least 93%, at least 94%, at least 95%, at least 96%, at least 97%, at least 98%, or at least 99%, identical thereto.

[0385] In any embodiment, a bridging molecule for binding to 0-acetylated GD2 may comprise or consist of the sequences set forth in SEQ ID NOs: 216 and 217, (light and heavy chain sequences recited, respectively) or a sequence at least 80%, at least 81%, at least 82%, at least 83%, at least 84%, at least 85%, at least 86%, at least 87%, at least 88%, at least 89%, at least 90%, at least 91%, at least 92%, at least 93%, at least 94%, at least 95%, at least 96%, at least 97%, at least 98%, or at least 99%, identical thereto.

[0386] In any embodiment, a bridging molecule for binding to GD3 may comprise or consist of the sequences set forth in SEQ ID NOs: 218 and 219, (light and heavy chain sequences recited, respectively) or a sequence at least 80%, at least 81%, at least 82%, at least 83%, at least 84%, at least 85%, at least 86%, at least 87%, at least 88%, at least 89%, at least 90%, at least 91%, at least 92%, at least 93%, at least 94%, at least 95%, at least 96%, at least 97%, at least 98%, or at least 99%, identical thereto.

[0387] In any embodiment, a bridging molecule for binding to GM2 may comprise or consist of the sequences set forth in SEQ ID NOs: 220 and 221, (light and heavy chain sequences recited, respectively) or a sequence at least 80%, at least 81%, at least 82%, at least 83%, at least 84%, at least 85%, at least 86%, at least 87%, at least 88%, at least 89%, at least 90%, at least 91%, at least 92%, at least 93%, at least 94%, at least 95%, at least 96%, at least 97%, at least 98%, or at least 99%, identical thereto.

[0388] In any embodiment, a bridging molecule for binding to TM4SF1 may comprise or consist of the sequences set forth in SEQ ID NOs: 222 and 223, (light and heavy chain sequences recited, respectively) or a sequence at least 80%, at least 81%, at least 82%, at least 83%, at least 84%, at least 85%, at least 86%, at least 87%, at least 88%, at least 89%, at least 90%, at least 91%, at least 92%, at least 93%, at least 94%, at least 95%, at least 96%, at least 97%, at least 98%, or at least 99%, identical thereto.

[0389] In any embodiment, a bridging molecule for binding to CD147 may comprise or consist of the sequences set forth in SEQ ID NOs: 224 and 225, (light and heavy chain sequences recited, respectively) or a sequence at least 80%, at least 81%, at least 82%, at least 83%, at least 84%, at least 85%, at least 86%, at least 87%, at least 88%, at least 89%, at least 90%, at least 91%, at least 92%, at least 93%, at least 94%, at least 95%, at least 96%, at least 97%, at least 98%, or at least 99%, identical thereto.

[0390] In any embodiment, a bridging molecule for binding to CEACAM5 may comprise or consist of the sequences set forth in SEQ ID NOs: 226 and 227, (light and heavy chain sequences recited, respectively) or a sequence at least 80%, at least 81%, at least 82%, at least 83%, at least 84%, at least 85%, at least 86%, at least 87%, at least 88%, at least 89%, at least 90%, at least 91%, at least 92%, at least 93%, at least 94%, at least 95%, at least 96%, at least 97%, at least 98%, or at least 99%, identical thereto.

[0391] In any embodiment, a bridging molecule for binding to VEGFR-1 may comprise or consist of the sequences set forth in SEQ ID NOs: 228 and 229, (light and heavy chain sequences recited, respectively) or a sequence at least 80%, at least 81%, at least 82%, at least 83%, at least 84%, at least 85%, at least 86%, at least 87%, at least 88%, at least 89%, at least 90%, at least 91%, at least 92%, at least 93%, at least 94%, at least 95%, at least 96%, at least 97%, at least 98%, or at least 99%, identical thereto.

[0392] In any embodiment, a bridging molecule for binding to Podoplanin (PDPN) may comprise or consist of the sequences set forth in SEQ ID NOs: 230 and 231, (light and heavy chain sequences recited, respectively) or a sequence at least 80%, at least 81%, at least 82%, at least 83%, at least 84%, at least 85%, at least 86%, at least 87%, at least 88%, at least 89%, at least 90%, at least 91%, at least 92%, at least 93%, at least 94%, at least 95%, at least 96%, at least 97%, at least 98%, or at least 99%, identical thereto.

[0393] In any embodiment, a bridging molecule for binding to WT1 may comprise or consist of the sequences set forth in SEQ ID NOs: 232 and 233, (light and heavy chain sequences recited, respectively) or a sequence at least 80%, at least 81%, at least 82%, at least 83%, at least 84%, at least 85%, at least 86%, at least 87%, at least 88%, at least 89%, at least 90%, at least 91%, at least 92%, at least 93%, at least 94%, at least 95%, at least 96%, at least 97%, at least 98%, or at least 99%, identical thereto.

[0394] In any embodiment, a bridging molecule for binding to GPC2 may comprise or consist of the sequences set forth in SEQ ID NOs: 234 and 235, (light and heavy chain sequences recited, respectively) or a sequence at least 80%, at least 81%, at least 82%, at least 83%, at least 84%, at least 85%, at least 86%, at least 87%, at least 88%, at least 89%, at least 90%, at least 91%, at least 92%, at least 93%, at least 94%, at least 95%, at least 96%, at least 97%, at least 98%, or at least 99%, identical thereto.

[0395] In any embodiment, a bridging molecule for binding to FGFR4 may comprise or consist of the sequences set forth in SEQ ID NOs: 236 and 237, (light and heavy chain sequences recited, respectively) or a sequence at least 80%, at least 81%, at least 82%, at least 83%, at least 84%, at least 85%, at least 86%, at least 87%, at least 88%, at least 89%, at least 90%, at least 91%, at least 92%, at least 93%, at least 94%, at least 95%, at least 96%, at least 97%, at least 98%, or at least 99%, identical thereto.

[0396] In any embodiment, a bridging molecule for binding to EphB4 may comprise or consist of the sequences set forth in SEQ ID NOs: 238 and 239, (light and heavy chain sequences recited, respectively) or a sequence at least 80%, at least 81%, at least 82%, at least 83%, at least 84%, at least 85%, at least 86%, at least 87%, at least 88%, at least 89%, at least 90%, at least 91%, at least 92%, at least 93%, at least 94%, at least 95%, at least 96%, at least 97%, at least 98%, or at least 99%, identical thereto.

[0397] In any embodiment, a bridging molecule for binding to STEAP-1 may comprise or consist of the sequences set forth in SEQ ID NOs: 240 and 241, (light and heavy chain sequences recited, respectively) or a sequence at least 80%, at least 81%, at least 82%, at least 83%, at least 84%, at least 85%, at least 86%, at least 87%, at least 88%, at least 89%, at least 90%, at least 91%, at least 92%, at least 93%, at least 94%, at least 95%, at least 96%, at least 97%, at least 98%, or at least 99%, identical thereto.

[0398] In any embodiment, a bridging molecule for binding to STEAP-2 may comprise or consist of the sequences set forth in SEQ ID NOs: 242 and 243, (light and heavy chain sequences recited, respectively) or a sequence at least 80%, at least 81%, at least 82%, at least 83%, at least 84%, at least 85%, at least 86%, at least 87%, at least 88%, at least 89%, at least 90%, at least 91%, at least 92%, at least 93%, at least 94%, at least 95%, at least 96%, at least 97%, at least 98%, or at least 99%, identical thereto.

[0399] In any embodiment, a bridging molecule for binding to IL11Ra may comprise or consist of the sequences set forth in SEQ ID NOs: 244 and 245, (light and heavy chain sequences recited, respectively) or a sequence at least 80%, at least 81%, at least 82%, at least 83%, at least 84%, at least 85%, at least 86%, at least 87%, at least 88%, at least 89%, at least 90%, at least 91%, at least 92%, at least 93%, at least 94%, at least 95%, at least 96%, at least 97%, at least 98%, or at least 99%, identical thereto.

[0400] In any embodiment, a bridging molecule for binding to CD163 may comprise or consist of the sequences set forth in SEQ ID NOs: 246 and 247, (light and heavy chain sequences recited, respectively) or a sequence at least 80%, at least 81%, at least 82%, at least 83%, at least 84%, at least 85%, at least 86%, at least 87%, at least 88%, at least 89%, at least 90%, at least 91%, at least 92%, at least 93%, at least 94%, at least 95%, at least 96%, at least 97%, at least 98%, or at least 99%, identical thereto.

[0401] In any embodiment, a bridging molecule for binding to Chlorotoxin may comprise or consist of the sequences set forth in SEQ ID NOs: 248 and 249, (light and heavy chain sequences recited, respectively) or a sequence at least 80%, at least 81%, at least 82%, at least 83%, at least 84%, at least 85%, at least 86%, at least 87%, at least 88%, at least 89%, at least 90%, at least 91%, at least 92%, at least 93%, at least 94%, at least 95%, at least 96%, at least 97%, at least 98%, or at least 99%, identical thereto.

[0402] In any embodiment, a bridging molecule for binding to CD206 may comprise or consist of the sequences set forth in SEQ ID NOs: 250, (heavy chain sequence recited) or a sequence at least 80%, at least 81%, at least 82%, at least 83%, at least 84%, at least 85%, at least 86%, at least 87%, at least 88%, at least 89%, at least 90%, at least 91%, at least 92%, at least 93%, at least 94%, at least 95%, at least 96%, at least 97%, at least 98%, or at least 99%, identical thereto.

[0403] In any embodiment, a bridging molecule for binding to IL1RAP may comprise or consist of the sequences set forth in SEQ ID NOs: 251 and 252, (light and heavy chain sequences recited, respectively) or a sequence at least 80%, at least 81%, at least 82%, at least 83%, at least 84%, at least 85%, at least 86%, at least 87%, at least 88%, at least 89%, at least 90%, at least 91%, at least 92%, at least 93%, at least 94%, at least 95%, at least 96%, at least 97%, at least 98%, or at least 99%, identical thereto.

[0404] In any embodiment, a bridging molecule for binding to MICA may comprise or consist of the sequences set forth in SEQ ID NOs: 253 and 254, (light and heavy chain sequences recited, respectively) or a sequence at least 80%, at least 81%, at least 82%, at least 83%, at least 84%, at least 85%, at least 86%, at least 87%, at least 88%, at least 89%, at least 90%, at least 91%, at least 92%, at least 93%, at least 94%, at least 95%, at least 96%, at least 97%, at least 98%, or at least 99%, identical thereto.

[0405] In any embodiment, a bridging molecule for binding to MAGE-A1 may comprise or consist of the sequences set forth in SEQ ID NOs: 255, or a sequence at least 80%, at least 81%, at least 82%, at least 83%, at least 84%, at least 85%, at least 86%, at least 87%, at least 88%, at least 89%, at least 90%, at least 91%, at least 92%, at least 93%, at least 94%, at least 95%, at least 96%, at least 97%, at least 98%, or at least 99%, identical thereto.

[0406] In any embodiment, a bridging molecule for binding to MAGE-A1 may comprise or consist of the sequences set forth in SEQ ID NOs: 256 and 257, or a sequence at least 80%, at least 81%, at least 82%, at least 83%, at least 84%, at least 85%, at least 86%, at least 87%, at least 88%, at least 89%, at least 90%, at least 91%, at least 92%, at least 93%, at least 94%, at least 95%, at least 96%, at least 97%, at least 98%, or at least 99%, identical thereto.

[0407] In any embodiment, a bridging molecule for binding to MAGE-A1 may comprise or consist of the sequences set forth in SEQ ID NOs: 258 and 259, or a sequence at least 80%, at least 81%, at least 82%, at least 83%, at least 84%, at least 85%, at least 86%, at least 87%, at least 88%, at least 89%, at least 90%, at least 91%, at least 92%, at least 93%, at least 94%, at least 95%, at least 96%, at least 97%, at least 98%, or at least 99%, identical thereto.

[0408] In any embodiment, a bridging molecule for binding to TRBC1 may comprise or consist of the sequences set forth in SEQ ID NOs: 260 and 261, (light and heavy chain sequences recited, respectively) or a sequence at least 80%, at least 81%, at least 82%, at least 83%, at least 84%, at least 85%, at least 86%, at least 87%, at least 88%, at least 89%, at least 90%, at least 91%, at least 92%, at least 93%, at least 94%, at least 95%, at least 96%, at least 97%, at least 98%, or at least 99%, identical thereto.

[0409] In any embodiment, a bridging molecule for binding to TRBC2 may comprise or consist of the sequences set forth in SEQ ID NOs: 262 and 263, (light and heavy chain sequences recited, respectively) or a sequence at least 80%, at least 81%, at least 82%, at least 83%, at least 84%, at least 85%, at least 86%, at least 87%, at least 88%, at least 89%, at least 90%, at least 91%, at least 92%, at least 93%, at least 94%, at least 95%, at least 96%, at least 97%, at least 98%, or at least 99%, identical thereto.

[0410] In any embodiment, a bridging molecule for binding to urokinase-type plasminogen activator receptor (uPAR) may comprise or consist of the sequences set forth in SEQ ID NOs: 264 and 265, (light and heavy chain sequences recited, respectively) or a sequence at least 80%, at least 81%, at least 82%, at least 83%, at least 84%, at least 85%, at least 86%, at least 87%, at least 88%, at least 89%, at least 90%, at least 91%, at least 92%, at least 93%, at least 94%, at least 95%, at least 96%, at least 97%, at least 98%, or at least 99%, identical thereto.

[0411] In any embodiment, a bridging molecule for binding to CD33 may comprise or consist of the sequences set forth in SEQ ID NOs: 268 and 269, (light and heavy chain sequences recited, respectively) or a sequence at least 80%, at least 81%, at least 82%, at least 83%, at least 84%, at least 85%, at least 86%, at least 87%, at least 88%, at least 89%, at least 90%, at least 91%, at least 92%, at least 93%, at least 94%, at least 95%, at least 96%, at least 97%, at least 98%, or at least 99%, identical thereto.

[0412] In any embodiment, a bridging molecule for binding to Her2 may comprise or consist of the sequences set forth in SEQ ID NOs: 276 and 277, (light and heavy chain sequences recited, respectively) or a sequence at least 80%, at least 81%, at least 82%, at least 83%, at least 84%, at least 85%, at least 86%, at least 87%, at least 88%, at least 89%, at least 90%, at least 91%, at least 92%, at least 93%, at least 94%, at least 95%, at least 96%, at least 97%, at least 98%, or at least 99%, identical thereto.

[0413] In any embodiment, a bridging molecule for binding to CD33 may comprise or consist of the sequences set forth in SEQ ID NOs: 278 and 279, (light and heavy chain sequences recited, respectively) or a sequence at least 80%, at least 81%, at least 82%, at least 83%, at least 84%, at least 85%, at least 86%, at least 87%, at least 88%, at least 89%, at least 90%, at least 91%, at least 92%, at least 93%, at least 94%, at least 95%, at least 96%, at least 97%, at least 98%, or at least 99%, identical thereto.

[0414] In any embodiment, a bridging molecule for binding to Her2 may comprise or consist of the sequences set forth in SEQ ID NOs: 270 and 271, (light and heavy chain sequences recited, respectively) or a sequence at least 80%, at least 81%, at least 82%, at least 83%, at least 84%, at least 85%, at least 86%, at least 87%, at least 88%, at least 89%, at least 90%, at least 91%, at least 92%, at least 93%, at least 94%, at least 95%, at least 96%, at least 97%, at least 98%, or at least 99%, identical thereto.

[0415] In any embodiment, a bridging molecule for binding to B7-H7 (HHLA2) may comprise or consist of the sequences set forth in SEQ ID NOs: 280 and 281, (light and heavy chain sequences recited, respectively) or a sequence at least 80%, at least 81%, at least 82%, at least 83%, at least 84%, at least 85%, at least 86%, at least 87%, at least 88%, at least 89%, at least 90%, at least 91%, at least 92%, at least 93%, at least 94%, at least 95%, at least 96%, at least 97%, at least 98%, or at least 99%, identical thereto.

[0416] In any embodiment, a bridging molecule for binding to CD34 may comprise or consist of the sequences set forth in SEQ ID NOs: 282 and 283, (light and heavy chain sequences recited, respectively) or a sequence at least 80%, at least 81%, at least 82%, at least 83%, at least 84%, at least 85%, at least 86%, at least 87%, at least 88%, at least 89%, at least 90%, at least 91%, at least 92%, at least 93%, at least 94%, at least 95%, at least 96%, at least 97%, at least 98%, or at least 99%, identical thereto.

[0417] In any embodiment, a bridging molecule for binding to CD7 may comprise or consist of the sequences set forth in SEQ ID NOs: 284 and 285, (light and heavy chain sequences recited, respectively) or a sequence at least 80%, at least 81%, at least 82%, at least 83%, at least 84%, at least 85%, at least 86%, at least 87%, at least 88%, at least 89%, at least 90%, at least 91%, at least 92%, at least 93%, at least 94%, at least 95%, at least 96%, at least 97%, at least 98%, or at least 99%, identical thereto.

[0418] In any embodiment, a bridging molecule for binding to CD7 may comprise or consist of the sequences set forth in SEQ ID NOs: 286, (heavy chain sequence) or a sequence at least 80%, at least 81%, at least 82%, at least 83%, at least 84%, at least 85%, at least 86%, at least 87%, at least 88%, at least 89%, at least 90%, at least 91%, at least 92%, at least 93%, at least 94%, at least 95%, at least 96%, at least 97%, at least 98%, or at least 99%, identical thereto.

[0419] In any embodiment, a bridging molecule for binding to GPRC5D may comprise or consist of the sequences set forth in SEQ ID NOs: 287 and 288, (light and heavy chain sequences recited, respectively) or a sequence at least 80%, at least 81%, at least 82%, at least 83%, at least 84%, at least 85%, at least 86%, at least 87%, at least 88%, at least 89%, at least 90%, at least 91%, at least 92%, at least 93%, at least 94%, at least 95%, at least 96%, at least 97%, at least 98%, or at least 99%, identical thereto.

[0420] In any embodiment, a bridging molecule for binding to TIM-3 may comprise or consist of the sequences set forth in SEQ ID NOs: 289 and 290, (light and heavy chain sequences recited, respectively) or a sequence at least 80%, at least 81%, at least 82%, at least 83%, at least 84%, at least 85%, at least 86%, at least 87%, at least 88%, at least 89%, at least 90%, at least 91%, at least 92%, at least 93%, at least 94%, at least 95%, at least 96%, at least 97%, at least 98%, or at least 99%, identical thereto.

[0421] In any embodiment, a bridging molecule for binding to CD191 (CCR1) may comprise or consist of the sequences set forth in SEQ ID NOs: 291 and 292, (light and heavy chain sequences recited, respectively) or a sequence at least 80%, at least 81%, at least 82%, at least 83%, at least 84%, at least 85%, at least 86%, at least 87%, at least 88%, at least 89%, at least 90%, at least 91%, at least 92%, at least 93%, at least 94%, at least 95%, at least 96%, at least 97%, at least 98%, or at least 99%, identical thereto.

[0422] In any embodiment, a bridging molecule for binding to CD66b (CEACAM8) may comprise or consist of the sequences set forth in SEQ ID NOs: 293 and 294, (light and heavy chain sequences recited, respectively) or a sequence at least 80%, at least 81%, at least 82%, at least 83%, at least 84%, at least 85%, at least 86%, at least 87%, at least 88%, at least 89%, at least 90%, at least 91%, at least 92%, at least 93%, at least 94%, at least 95%, at least 96%, at least 97%, at least 98%, or at least 99%, identical thereto.

[0423] In any embodiment, a bridging molecule for binding to CD11b (MAC-1) may comprise or consist of the sequences set forth in SEQ ID NOs: 295 and 296, (light and heavy chain sequences recited, respectively) or a sequence at least 80%, at least 81%, at least 82%, at least 83%, at least 84%, at least 85%, at least 86%, at least 87%, at least 88%, at least 89%, at least 90%, at least 91%, at least 92%, at least 93%, at least 94%, at least 95%, at least 96%, at least 97%, at least 98%, or at least 99%, identical thereto.

[0424] In any embodiment, a bridging molecule for binding to EMR2 (ADGRE2) may comprise or consist of the sequences set forth in SEQ ID NOs: 297 and 298, (light and heavy chain sequences recited, respectively) or a sequence at least 80%, at least 81%, at least 82%, at least 83%, at least 84%, at least 85%, at least 86%, at least 87%, at least 88%, at least 89%, at least 90%, at least 91%, at least 92%, at least 93%, at least 94%, at least 95%, at least 96%, at least 97%, at least 98%, or at least 99%, identical thereto.

[0425] In any embodiment, a bridging molecule for binding to MUC16 may comprise or consist of the sequences set forth in SEQ ID NOs: 299 and 300, (light and heavy chain sequences recited, respectively) or a sequence at least 80%, at least 81%, at least 82%, at least 83%, at least 84%, at least 85%, at least 86%, at least 87%, at least 88%, at least 89%, at least 90%, at least 91%, at least 92%, at least 93%, at least 94%, at least 95%, at least 96%, at least 97%, at least 98%, or at least 99%, identical thereto.

[0426] In any embodiment, a bridging molecule for binding to NYESO-1 HLA-A2 may comprise or consist of the sequences set forth in SEQ ID NOs: 301 and 302, or a sequence at least 80%, at least 81%, at least 82%, at least 83%, at least 84%, at least 85%, at least 86%, at least 87%, at least 88%, at least 89%, at least 90%, at least 91%, at least 92%, at least 93%, at least 94%, at least 95%, at least 96%, at least 97%, at least 98%, or at least 99%, identical thereto.

[0427] In any embodiment, a bridging molecule for binding to Survivin HLA-A2 may comprise or consist of the sequences set forth in SEQ ID NOs: 303 and 304, or a sequence at least 80%, at least 81%, at least 82%, at least 83%, at least 84%, at least 85%, at least 86%, at least 87%, at least 88%, at least 89%, at least 90%, at least 91%, at least 92%, at least 93%, at least 94%, at least 95%, at least 96%, at least 97%, at least 98%, or at least 99%, identical thereto.

[0428] In any embodiment, a bridging molecule for binding to BCMA may comprise or consist of the sequences set forth in SEQ ID NOs: 305, or a sequence at least 80%, at least 81%, at least 82%, at least 83%, at least 84%, at least 85%, at least 86%, at least 87%, at least 88%, at least 89%, at least 90%, at least 91%, at least 92%, at least 93%, at least 94%, at least 95%, at least 96%, at least 97%, at least 98%, or at least 99%, identical thereto.

[0429] In any embodiment, a bridging molecule for binding to BCMA may comprise or consist of the sequences set forth in SEQ ID NOs: 306, or a sequence at least 80%, at least 81%, at least 82%, at least 83%, at least 84%, at least 85%, at least 86%, at least 87%, at least 88%, at least 89%, at least 90%, at least 91%, at least 92%, at least 93%, at least 94%, at least 95%, at least 96%, at least 97%, at least 98%, or at least 99%, identical thereto.

[0430] In any embodiment, a bridging molecule for binding to C200 may comprise or consist of the sequences set forth in SEQ ID NOs: 308 and 307, (light and heavy chain sequences recited, respectively) or a sequence at least 80%, at least 81%, at least 82%, at least 83%, at least 84%, at least 85%, at least 86%, at least 87%, at least 88%, at least 89%, at least 90%, at least 91%, at least 92%, at least 93%, at least 94%, at least 95%, at least 96%, at least 97%, at least 98%, or at least 99%, identical thereto.

[0431] In any aspect, the bridging molecule described herein does not have a HIS tag.

[0432] Also contemplated, is a bridging molecule that comprises an amino acid sequence specified in the Sequence information table above, but without a HIS tag specified in the sequence, or a sequence at least 80%, at least 81%, at least 82%, at least 83%, at least 84%, at least 85%, at least 86%, at least 87%, at least 88%, at least 89%, at least 90%, at least 91%, at least 92%, at least 93%, at least 94%, at least 95%, at least 96%, at least 97%, at least 98%, or at least 99%, identical thereto. Further, in one embodiment, the bridging molecule may comprise a tag other than a HIS tag, or may comprise an amino acid sequence specified in the Sequence information table above but with a different tag in the position of the HIS tag specified in the sequence.

### Nucleic Acids

[0433] In a second aspect, the present invention provides a nucleic acid molecule encoding a bridging molecule of the invention, or part thereof.

[0434] The nucleic acid molecule may comprise any polyribonucleotide or polydeoxyribonucleotide, which may be unmodified, or modified, RNA or DNA. For example, the nucleic acid molecule may include single- and/or double-stranded DNA, DNA that is a mixture of single- and double-stranded regions, single- and double-stranded RNA, and RNA that is mixture of single- and double-stranded regions, hybrid molecules comprising DNA and RNA that may be single-stranded or, more typically, double-stranded or a mixture of single- and double-stranded regions. In addition, the nucleic acid molecule may comprise triple-stranded regions comprising RNA or DNA or both RNA and DNA. The nucleic acid molecule may also comprise one or more modified bases or DNA or RNA backbones modified for stability or for other reasons. A variety of modifications can be made to DNA and RNA; thus the term “nucleic acid molecule” embraces chemically, enzymatically, or metabolically modified forms.

[0435] In some embodiments of the second aspect of the invention, the nucleic acid molecule comprises a nucleic acid sequence encoding the amino acid sequence of any one of SEQ ID NOs: 2 to 308. Preferably, the nucleic acid comprises a nucleotide sequence encoding the heavy chain and light chain pairs described above.

[0436] Further, the present invention provides a nucleic acid construct including a nucleic acid molecule encoding a bridging molecule of the invention, or part thereof. The nucleic acid construct may further comprise one or more of: an origin of replication for one or more hosts; a selectable marker gene that is active in one or more hosts; and/or one or more transcriptional control sequences.

[0437] As used herein, the term “selectable marker gene” includes any gene that confers a phenotype on a cell in which it is expressed, to facilitate the identification and/or selection of cells that are transfected or transformed with the construct.

[0438] “Selectable marker genes” include any nucleotide sequences which, when expressed by a cell transformed with the construct, confer a phenotype on the cell that facilitates the identification and/or selection of these transformed cells. A range of nucleotide sequences encoding suitable selectable markers are known in the art (for example Mortesen, R M. and Kingston R E. Curr Protoc Mol Biol, 2009; Unit 9.5). Exemplary nucleotide sequences that encode selectable markers include: Adenosine deaminase (ADA) gene; Cytosine deaminase (CDA) gene; Dihydrofolate reductase (DHFR) gene; Histidinol dehydrogenase (hisD) gene; Puromycin-N-acetyl transferase (PAC) gene; Thymidine kinase (TK) gene; Xanthine-guanine phosphoribosyltransferase (XGPRT) gene or antibiotic resistance genes such as ampicillin-resistance genes, puromycin-resistance genes, Bleomycin-resistance genes, hygromycin-resistance genes, kanamycin-resistance genes and ampicillin-resistance genes; fluorescent reporter genes such as the green, red, yellow or blue fluorescent protein-encoding genes; and luminescence-based reporter genes such as the luciferase gene, amongst others which permit optical selection of cells using techniques such as Fluorescence-Activated Cell Sorting (FACS).

[0439] Furthermore, it should be noted that the selectable marker gene may be a distinct open reading frame in the construct or may be expressed as a fusion protein with another polypeptide (e.g. the CAR).

[0440] As set out above, the nucleic acid construct may also comprise one or more transcriptional control sequences. The term “transcriptional control sequence” should be understood to include any nucleic acid sequence that effects the transcription of an operably connected nucleic acid. A transcriptional control sequence may include, for example, a leader, polyadenylation sequence, promoter, enhancer or upstream activating sequence, and transcription terminator. Typically, a transcriptional control sequence at least includes a promoter. The term “promoter” as used herein, describes any nucleic acid that confers, activates or enhances expression of a nucleic acid in a cell.

[0441] In some embodiments, at least one transcriptional control sequence is operably connected to the nucleic acid molecule of the second aspect of the invention.

[0442] For the purposes of the present specification, a transcriptional control sequence is regarded as “operably connected” to a given nucleic acid molecule when the transcriptional control sequence is able to promote, inhibit or otherwise modulate the transcription of the nucleic acid molecule. Therefore, in some embodiments, the nucleic acid molecule is under the control of a transcription control sequence, such as a constitutive promoter or an inducible promoter.

[0443] The “nucleic acid construct” may be in any suitable form, such as in the form of a plasmid, phage, transposon, cosmid, chromosome, vector, etc., which is capable of replication when associated with the proper control elements and which can transfer gene sequences, contained within the construct, between cells. Thus, the term includes cloning and expression vehicles, as well as viral vectors. In some embodiments, the nucleic acid construct is a vector. In some embodiments the vector is a viral vector.

[0444] A promoter may regulate the expression of an operably connected nucleic acid molecule constitutively, or differentially, with respect to the cell, tissue, or organ at which expression occurs. As such, the promoter may include, for example, a constitutive promoter, or an inducible promoter. A “constitutive promoter” is a promoter that is active under most environmental and physiological conditions. An “inducible promoter” is a promoter that is active under specific environmental or physiological conditions. The present invention contemplates the use of any promoter that is active in a cell of interest. As such, a wide array of promoters would be readily ascertained by one of ordinary skill in the art.

[0445] Mammalian constitutive promoters may include, but are not limited to, Simian virus 40 (SV40), cytomegalovirus (CMV), P-actin, Ubiquitin C (UBC), elongation factor-1 alpha (EF1A), phosphoglycerate kinase (PGK) and CMV early enhancer/chicken β actin (CAGG).

[0446] Inducible promoters may include, but are not limited to, chemically inducible promoters and physically inducible promoters. Chemically inducible promoters include promoters that have activity that is regulated by chemical compounds such as alcohols, antibiotics, steroids, metal ions or other compounds. Examples of chemically inducible promoters include: tetracycline regulated promoters (e.g. see U.S. Pat. Nos. 5,851,796 and 5,464,758); steroid responsive promoters such as glucocorticoid receptor promoters (e.g. see U.S. Pat. No. 5,512,483), ecdysone receptor promoters (e.g. see U.S. Pat. No. 6,379,945) and the like; and metal-responsive promoters such as metallothionein promoters (e.g. see U.S. Pat. Nos. 4,940,661, 4,579,821 and 4,601,978) amongst others.

[0447] In the context of the present invention, it will be appreciated that it may be desirable in certain circumstances for the expression of the bridging molecule to be under the control of an inducible promoter. This enables a switching on and switching off of the expression of the nucleic acid encoding the bridging molecule.

[0448] In certain embodiment, and in the case of an inducible expression construct, an immune cell expressing a CAR can be genetically modified with a) a nucleic acid encoding an antigen binding receptor and b) an inducible expression construct encoding the bridging molecule. Upon binding of dysfunctional P2X₇ receptor, the immune cell induces expression of the gene encoding the bridging molecule. In certain embodiments, expression of such gene facilitates and/or improves treatment of cancer.

[0449] As mentioned above, the control sequences may also include a terminator. The term “terminator” refers to a DNA sequence at the end of a transcriptional unit that signals termination of transcription. Terminators are 3′-non-translated DNA sequences generally containing a polyadenylation signal, which facilitate the addition of polyadenylate sequences to the 3′-end of a primary transcript. As with promoter sequences, the terminator may be any terminator sequence that is operable in the cells, tissues or organs in which it is intended to be used. Suitable terminators would be known to a person skilled in the art.

[0450] As will be understood, the nucleic acid constructs of the invention can further include additional sequences, for example sequences that permit enhanced expression, cytoplasmic or membrane transportation, and location signals. Specific non-limiting examples include an Internal Ribosome Entry Site (IRES) or cleavage site (e.g. P2A, T2A).

[0451] The present invention extends to all genetic constructs essentially as described herein. These constructs may further include nucleotide sequences intended for the maintenance and/or replication of the genetic construct in eukaryotes and/or the integration of the genetic construct or a part thereof into the genome of a eukaryotic cell.

[0452] Methods are known in the art for the deliberate introduction (transfection/transduction) of exogenous genetic material, such as the nucleic acid construct of the third aspect of the present invention, into eukaryotic cells. As will be understood, the method best suited for introducing the nucleic acid construct into the desired host cell is dependent on many factors, such as the size of the nucleic acid construct, the type of host cell, the desired rate of efficiency of the transfection/transduction and the final desired, or required, viability of the transfected/transduced cells. Non-limiting examples of such methods include; chemical transfection with chemicals such as cationic polymers, calcium phosphate, or structures such as liposomes and dendrimers; non-chemical methods such as electroporation, sonoporation, heat-shock or optical transfection; particle-based methods such as ‘gene gun’ delivery, magnetofection, or impalefection or viral transduction.

[0453] The nucleic acid construct will be selected depending on the desired method of transfection/transduction. In some embodiments of the third aspect of the invention, the nucleic acid construct is a viral vector, and the method for introducing the nucleic acid construct into a host cell is viral transduction. Methods are known in the art for utilising viral transduction to elicit expression of a CAR in a PBMC (Parker, L L. et al. Hum Gene Ther. 2000; 11: 2377-87) and more generally utilising retroviral systems for transduction of mammalian cells (Cepko, C. and Pear, W. Curr Protoc Mol Biol. 2001, unit 9.9). In other embodiments, the nucleic acid construct is a plasmid, a cosmid, an artificial chromosome or the like, and can be transfected into the cell by any suitable method known in the art.

### Modified Cells

[0454] As described herein, the invention includes the use of a cell expressing a chimeric antigen receptor comprising an antigen-recognition domain, wherein the antigen-recognition domain recognises a tumour-specific antigen (such as dysfunctional P2X₇ receptor) expressed on a cell surface. The cell may be an “engineered cell”, “genetically modified cell”, “immune cell” or “immune effector cell” as described herein. Further, the cell may be capable of differentiating into an immune cell. A cell that is capable of differentiating into an immune cell (e.g. T cell that will express the dysfunctional P2X₇ CAR) may be a stem cell, multi-lineage progenitor cell or induced pluripotent stem.

[0455] In any embodiment, the cell may be a T cell, wherein optionally said T cell does not express TcRαβ, PD1, CD3 or CD96 (e.g. by way of knocking down or knocking out one of these genes on a genetic level or functional level).

[0456] In any embodiment, the cell may be an immune cell, wherein optionally said cell does not express accessory molecules that can be checkpoint, exhaustion or apoptosis-associated signalling receptors as well as ligands such as PD-1, LAG-3, TIGIT, CTLA-4, FAS-L and FAS-R, (e.g. by way of knocking out one of these genes on a genetic level or functional level).

[0457] In some embodiments, the genetically modified cell includes two or more different CARs.

[0458] In some embodiments of the invention, the genetically modified cell includes a nucleic acid molecule, or a nucleic acid construct, that encodes for two or more different CARs. In some embodiments of the invention, the genetically modified cell includes two or more nucleic acid molecules, or two or more nucleic acid constructs, each of which encodes for a different CAR.

[0459] As referred to herein, a “genetically modified cell” includes any cell comprising a non-naturally occurring and/or introduced nucleic acid molecule or nucleic acid construct encompassed by the present invention. The introduced nucleic acid molecule or nucleic acid construct may be maintained in the cell as a discreet DNA molecule, or it may be integrated into the genomic DNA of the cell.

[0460] Genomic DNA of a cell should be understood in its broadest context to include any and all endogenous DNA that makes up the genetic complement of a cell. As such, the genomic DNA of a cell should be understood to include chromosomes, mitochondrial DNA and the like. As such, the term “genomically integrated” contemplates chromosomal integration, mitochondrial DNA integration, and the like. The “genomically integrated form” of the construct may be all or part of the construct. However, in some embodiments the genomically integrated form of the construct at least includes the nucleic acid molecule of the second aspect of the invention.

[0461] As used herein, the term “different CARs” or “different chimeric antigen receptors” refers to any two or more CARs that have either non-identical antigen-recognition and/or non-identical signalling domains. In one example, “different CARs” includes two CARs with the same antigen-recognition domains (e.g. both CARs may recognise a dysfunctional P2X₇ receptor), but have different signalling domains, such as one CAR having a signalling domain with a portion of an activation receptor and the other CAR having a signalling domain with a portion of an co-stimulatory receptor. As will be understood, at least one of the two or more CARs within this embodiment will have an antigen-recognition domain that recognises the dysfunctional P2X₇ receptor and the other CAR(s) may take any suitable form and may be directed against any suitable antigen.

[0462] Accordingly, in some embodiments of the invention the two or more different CARs have different signalling domains, and may have identical, or different, antigen-recognition domains. Specifically, the genetically modified cell of the invention may include a first chimeric antigen receptor with a signalling domain that includes a portion derived from an activation receptor and a second chimeric antigen receptor with a signalling domain including a portion derived from a co-stimulatory receptor.

[0463] In some embodiments, the activation receptor (from which a portion of signalling domain is derived) is the CD3 co-receptor complex or is an Fc receptor.

[0464] In some embodiments, the co-stimulatory receptor (from which a portion of signalling domain is derived) is selected from the group consisting of CD27, CD28, CD-30, CD40, DAP10, OX40, 4-1BB (CD137) and ICOS.

[0465] In some embodiments, the co-stimulatory receptor (from which a portion of signalling domain is derived) is selected from the group consisting of CD28, OX40 or 4-1BB.

[0466] In some embodiments, the genetically modified cell is further modified to constitutively express co-stimulatory receptors.

[0467] As described above, a cellular immune response is typically only induced when an activation signal (typically in response to an antigen) and a co-stimulation signal are simultaneously experienced. Therefore, by having a genetically modified cell in accordance with some of the above embodiments, which includes two or more CARs that in combination provide both an intracellular activation signal and an intracellular co-stimulation signal, ensures that a sufficient immune response can be induce in response to the recognition by the CAR(s) of their cognate antigen. Alternatively, the genetically modified cell may include only one CAR, which has an antigen-recognition domain that recognises a dysfunctional P2X₇ receptor, and may constitutively express co-stimulatory receptors, thereby increasing the likelihood of co-stimulation being provided simultaneously when the CAR is activated. Alternatively, the genetically modified cell may be further modified to constitutively express both co-stimulatory receptor(s) and its/their ligand(s). In this way the cell is continuously experiencing co-stimulation and only needs the activation of a CAR, with a signalling domain including a portion from an activation receptor, for immune activation of the cell.

[0468] Therefore in some embodiments, the genetically modified cell expressing the CAR is further modified so as to constitutively express co-stimulatory receptors. In further embodiments, the genetically modified cell is further modified so as to express ligands for the co-stimulatory receptors, thereby facilitating auto-stimulation of the cell. Examples of CAR-expressing T cells that also express both co-stimulatory receptors and their cognate ligands (so as to induce auto-stimulation) are known in the art and include, inter alia, those disclosed in Stephen MT. et al. Nat Med, 2007; 13: 1440-9.

[0469] The potency of a genetically modified cell including a CAR can be enhanced by further modifying the cell so as to secrete cytokines, preferably pro-inflammatory or pro-proliferative cytokines. This secretion of cytokines provide both autocrine support for the cell expressing the CAR, and alters the local environment surrounding the CAR-expressing cell such that other cells of the immune system are recruited and activated. Consequently, in some embodiments of the fourth or fifth aspects of the invention the genetically modified cell is further modified to secret cytokines. This secretion may be constitutive, or may be inducible upon recognition of a CAR of its cognate antigen of ligand.

[0470] Whilst any one or more cytokines can be selected depending on the desired immune response, preferable cytokines and/or chemokines include IL-2, IL-7, IL-12, IL-15, IL-17, IL-18 and IL-21, CCL19, CCL21 or a combination thereof.

[0471] The immune cell of the invention can be any suitable immune cell, or progenitor cell thereof, or can be a homogeneous or a heterogeneous cell population. In some embodiments, the cell is a leukocyte, a Peripheral Blood Mononuclear Cell (PBMC), a lymphocyte, a T cell, a CD4+ T cell, a CD8+ T cell, a natural killer cell, a natural killer T cell, or a γδ T cell.

[0472] The immune cell may be a T cell, wherein optionally said T cell does not express TcRαβ, PD1, CD3 or CD96 (e.g. by way of knocking down or knocking out one of these genes on a genetic level or functional level).

[0473] The immune cell may not express accessory molecules that can be checkpoint, exhaustion or apoptosis-associated signalling receptors as well as ligands such as PD-1, LAG-3, TIGIT, CTLA-4, FAS-L and FAS-R, (e.g. by way of knocking out, or knocking down, one of these genes on a genetic level or functional level).

### Methods of Treatment and Administration

[0474] As discussed further in this document, the present invention finds application in the treatment of a variety of conditions, although preferably in the treatment of cancers.

[0475] The present invention also contemplates various scenarios for the use of the two components of the therapeutics described herein.

[0476] In one scenario, the individual requiring treatment is administered a single composition comprising both the CAR T cells and the bridging molecule.

[0477] In further scenarios, the individual requiring treatment is administered a population of CAR T cells, which cells comprise an expression vector encoding the bridging molecule. The expression vector may facilitate constitutive or inducible expression of the nucleic acid sequence encoding the bridging molecule.

[0478] Further still, the individual requiring treatment may be administered the CAR T cells, and at a later date, be administered a composition comprising the bridging molecule (e.g., via infusion), or a nucleic acid sequence encoding the bridging molecule.

[0479] Such a scenario may be appropriate in circumstances where the individual is first treated with the CAR T cells for targeted treatment of cancers that are positive for dysfunctional P2X₇ receptor and wherein the subsequent administration of the bridging molecule is for the purposes of redirecting the CARs to alternative cancer antigens, or to peptides derived from an infectious agent and which are presented on MHC I or II molecules of cells.

[0480] Thus the bridging molecule may be administered prior to, at the same time as, or after the subject receives treatment with the CAR T cell.

[0481] Where the bridging molecule and CAR T cells are administered to the subject at the same time, they can be administered via the same route of administration (including in a single composition), or alternatively via different routes of administration. For example, the CAR T cells may be administered by injection into the blood stream of the subject, while the bridging molecule may be administered via another route of administration such as intramuscularly, intradermally, subcutaneously or intraperitoneally.

[0482] A bridging molecule may be produced or expressed inside the body by genetically engineered cells secreting bridging molecules spontaneously or upon stimulation via a stimulating agent e.g. a small molecule. Alternatively, cells may continuously secrete bridging molecules and will stop secreting them upon application of a stimulating agent, e.g. a small molecule.

[0483] It will be clearly understood that, although this specification refers specifically to applications in humans, the invention is also useful for veterinary purposes. Thus in all aspects the invention is useful for domestic animals such as cattle, sheep, horses and poultry; for companion animals such as cats and dogs; and for zoo animals. Therefore, the general term “subject” or “subject to be/being treated” is understood to include all animals (such as humans, apes, dogs, cats, horses, and cows).

[0484] The term “administered” means administration of a therapeutically effective dose of the aforementioned composition including the respective cells to an individual. By “therapeutically effective amount” is meant a dose that produces the effects for which it is administered. The exact dose will depend on the purpose of the treatment, and will be ascertainable by one skilled in the art using known techniques. As is known in the art and described above, adjustments for systemic versus localised delivery, age, body weight, general health, sex, diet, time of administration, drug interaction and the severity of the condition may be necessary, and will be ascertainable with routine experimentation by those skilled in the art.

[0485] Subjects requiring treatment include those already having a benign, pre-cancerous, or non-metastatic tumour as well as those in which the occurrence or recurrence of cancer is to be prevented. Subjects may have metastatic cells, including metastatic cells present in the ascites fluid and/or lymph node.

[0486] The objective or outcome of treatment may be to reduce the number of cancer cells; reduce the primary tumour size; inhibit (i.e., slow to some extent and preferably stop) cancer cell infiltration into peripheral organs; inhibit (i.e., slow to some extent and preferably stop) tumour metastasis; inhibit, to some extent, tumour growth; and/or relieve to some extent one or more of the symptoms associated with the disorder.

[0487] Efficacy of treatment can be measured by assessing the duration of survival, time to disease progression, the response rates (RR), duration of response, and/or quality of life.

[0488] The method is particularly useful for extending time to disease progression.

[0489] The method is particularly useful for extending survival of the human, including overall survival as well as progression free survival.

[0490] The method is particularly useful for providing a complete response to therapy whereby all signs of cancer in response to treatment have disappeared. This does not always mean the cancer has been cured.

[0491] The method is particularly useful for providing a partial response to therapy whereby there has been a decrease in the size of one or more tumours or lesions, or in the extent of cancer in the body, in response to treatment.

[0492] The objective or outcome of treatment may be any one or more of the following:
[0493] to reduce the number of cancer cells;
[0494] reduce the primary tumour size;
[0495] inhibit (i.e., slow to some extent and preferably stop) cancer cell infiltration into peripheral organs;
[0496] inhibit (i.e., slow to some extent and preferably stop) tumour metastasis;
[0497] inhibit, to some extent, tumour growth;
[0498] relieve to some extent one or more of the symptoms associated with the disorder.

[0499] In one embodiment, subjects requiring treatment include those having a benign, pre-cancerous, non-metastatic tumour.

[0500] In one embodiment, the cancer is pre-cancerous or pre-neoplastic.

[0501] In one embodiment, the cancer is a secondary cancer or metastasis. The secondary cancer may be located in any organ or tissue, and particularly those organs or tissues having relatively higher haemodynamic pressures, such as lung, liver, kidney, pancreas, bowel and brain. The secondary cancer may be detected in the ascites fluid and/or lymph nodes.

[0502] In one embodiment, the cancer may be substantially undetectable.

[0503] “Pre-cancerous” or “preneoplasia” generally refers to a condition or a growth that typically precedes or develops into a cancer. A “pre-cancerous” growth may have cells that are characterised by abnormal cell cycle regulation, proliferation, or differentiation, which can be determined by markers of cell cycle.

[0504] The cancer may be a solid or a “liquid” tumour. In other words, the cancer may be growth in a tissue (carcinoma, sarcoma, adenomas etc) or it may be a cancer present in bodily fluid such as in blood or bone marrow (e.g., lymphomas and leukaemias).

[0505] In certain preferred embodiments, the cancer requiring treatment may be a cancer characterised by low levels of expression of dysfunctional P2X₇ receptor.

[0506] Examples of such cancers include Burkitt's lymphoma. However, immunohistochemical analyses of surface expression of the dysfunctional P2X₇ (nfP2X₇) receptor on patient tumour biopsies reveals a range from 1+ to 3+ in IHC score. Samples with low expression may therefore be found in a wide range of tumour types. Examples are found in solid tumours of various types, including but not limited to neuroblastoma, colorectal cancers, lung cancers, kidney cancers, skin cancers, breast cancers, brain cancers and prostate cancer. Such differences in expression level in different tissues may be due to the formation of tumours from cells that are at an earlier state of transformation (the tissues with the highest receptor expression may be those undergoing the highest rate of proliferation).

[0507] Other examples of cancers that can be treated in accordance with the methods of the present invention include blastoma (including medulloblastoma and retinoblastoma), sarcoma (including liposarcoma and synovial cell sarcoma), neuroendocrine tumours (including carcinoid tumours, gastrinoma, and islet cell cancer), mesothelioma, schwannoma (including acoustic neuroma), meningioma, adenocarcinoma, melanoma, leukaemia or lymphoid malignancies, lung cancer including small-cell lung cancer (SCKC), non-small cell lung cancer (NSCLC), adenocarcinoma of the lung and squamous carcinoma of the lung, cancer of the peritoneum, hepatocellular cancer, gastric or stomach cancer including gastrointestinal cancer, pancreatic cancer, glioblastoma, cervical cancer, ovarian cancer, liver cancer, bladder cancer, hepatoma, breast cancer (including metastatic breast cancer), colon cancer, rectal cancer, colorectal cancer, endometrial or uterine carcinoma, salivary gland carcinoma, kidney or renal cancer, prostate cancer, vulval cancer, thyroid cancer, hepatic carcinoma, anal carcinoma, penile carcinoma, testicular cancer, oesophageal cancer, tumours of the biliary tract, as well as head and neck cancer.

[0508] In further examples, the methods of treatment contemplated within the scope of the present invention, include methods for treating or preventing an infectious disease. Thus, the bridging molecules of the invention can be utilised to redirect the CAR T cells towards an additional surface accessible antigen, for example wherein the antigen is a non-cancer associated pathogenic antigen presented on an MHC I or MHC II molecule as further described herein.

[0509] The subject requiring treatment for an infectious disease may be at risk or have been diagnosed with the disease. Subjects at risk include those who are immunocompromised. Thus, the methods of the present invention also allow for the prevention of onset of infectious disease in individuals receiving therapy (such as for treating cancer) that renders them immunocompromised and therefore susceptible to infection.

[0510] Examples of intracellular pathogens from which peptides are presented on MHC I or MHC II molecules include: viral infections, intracellular bacterial infections, protozoan infections, and intracellular fungal infections.

[0511] Examples of viral infections that may be treated using the methods of the present invention include: HIV, hepatitis (e.g., Hepatitis A, B or C), a coronavirus (e.g. SARS-CoV-2), an influenza virus, varicella zoster virus, mumps virus.

[0512] Examples of intracellular bacterial infections which may be treated using the methods of the present invention include: mycobacterial infections (e.g., Mycobacterium tuberculosis), Bartonella henselae, Francisella tularensis, Listeria monocytogenes, Salmonella Typhi, Brucella, Legionella, Nocardia, Neisseria, Rhodococcus, Yersinia, Staphylococcus aureus, Chlamydia, Rickettsia, Coxiella, and Chlamydophila pneumoniae.

[0513] Examples of intracellular infections caused by fungal pathogens: Histoplasma capsulatum, Cryptococcus neoformans, and Pneumocystitis jirovecii.

[0514] Examples of obligate intracellular protozoan pathogens include: Apicomplexans (Plasmodium spp., Toxoplasma gondii and Cryptosporidium parvum), and Trypanosomatids (Leishmania spp. and Trypanosoma cruzi).

[0515] Immune cells that may be targeted to modulate the immune system in the context of cancer and/or autoimmune disease may be B cells (CD19, CD20, CD22), plasma cells (BCMA, CD38, CD138), T cell subsets via (TRBC1 or TRBC2, α4β7 & αEβ7, CD7), macrophages and TAMs (CD163 and CD206). In the context of allogeneic stem cell transplantation, immune-based conditioning may be undertaken by targeting (CD34, CD117, CD133, CD33 and CD38) especially in case of non-malignant diseases e.g. thalassaemia major or sickle cell anaemia and/or in case of DNA-repair defects like Fanconi anaemia.

[0516] Targeting senescent tumour cells via the marker (uPAR) will help to eliminate tumour cells in a resting state and which are likely to expand at later time points and promote even faster proliferation of cancer cells in the latter by secreting tumour promoting cytokines and shaping a tumour-suppressive environment protecting new cancerous subclones.

[0517] CAR T cells may be constructed in a way that they are able to immunosuppress other immune cells, e.g. TREG CAR T cells or by secreting immunosuppressive cytokines (TGFbeta, IL10) and chemokines by introducing the corresponding inducible expression cassette [NFAT-dependent cytokine secretion] and the signalling in the construct.

[0518] The bridging molecules of the invention may be formulated for administration to a subject using techniques known to the skilled artisan. Formulations of the bridging molecules may include pharmaceutically acceptable excipient(s) (carriers or diluents). Examples of generally used excipients include, without limitation: saline, buffered saline, dextrose, water-for-injection, glycerol, ethanol, and combinations thereof, stabilising agents, solubilising agents and surfactants, buffers and preservatives, tonicity agents, bulking agents, and lubricating agents.

[0519] A formulation of bridging molecules may include one type of bridging molecule, or more than one type of bridging molecule (i.e., wherein the bridging molecules may have the same or different targeting and/or dysfunctional P2X₇ receptor epitope moieties).

[0520] The bridging molecules may be administered to a subject using modes and techniques known to the skilled artisan. Exemplary modes include, but are not limited to, intravenous, intraperitoneal, and intratumoural injection. Other modes include, without limitation, intradermal, subcutaneous (s.c, s.q., sub-Q, Hypo), intramuscular (i.m.), intra-arterial, intramedullary, intracardiac, intra-articular (joint), intrasynovial (joint fluid area), intracranial, intraspinal, and intrathecal (spinal fluids).

[0521] Formulations comprising the bridging molecule are administered to a subject in an amount that is effective for treating the specific indication or disorder. In general, formulations comprising at least about 0.01 μg/kg to about 100 mg/kg body weight of the bridging molecule may be administered to a subject in need of treatment. In most cases, the dosage may be from about 100 μg/kg to about 10 mg/kg body weight of the bridging molecules daily, taking into account the routes of administration, symptoms, etc. However, the amount of bridging molecules in formulations administered to a subject may vary between wide limits, depending upon the location, source, identity, extent and severity of the disorder, the age and condition of the individual to be treated, etc. A physician may ultimately determine appropriate dosages to be used. The bridging molecules may be administered as a continuous infusion or a bolus application.

[0522] The timing between the administration of the CAR T cell and the bridging molecule formulation may range widely depending on factors that include the type of (immune) cells being used, the binding specificity of the CAR, the identity of the targeting moiety and the identity of the target cell, e.g. cancer cell to be treated, the location of the target cell in the subject, the means used to administer the formulations to the subject, and the health, age and weight of the subject being treated. Indeed, the TCBM formulation may be administered prior to, simultaneous with, or after the genetically engineered (immune) cell formulation.

[0523] It will be understood that the invention disclosed and defined in this specification extends to all alternative combinations of two or more of the individual features mentioned or evident from the text or drawings. All of these different combinations constitute various alternative aspects of the invention.

### EXAMPLES

### Example 1—Materials and Methods Including Generation of Bridging Molecules

[0524] Cultivation, transfection and protein production were performed as per ExpiCHO Expression System User Guide (Thermo—ExpiCHO™ Expression System USER GUIDE. For transfection of ExpiCHO-S™ Cells in a defined, serum-free medium Catalogue Number A29133, Publication Number MAN0014337). In summary, ExpiCHO were routinely passaged and maintained at less than 4-6×10⁶ cell/mL in ExpiCHO medium. Cells in the mid-log growth phase were transfected when cell number was in the range of 5-7×10⁶ cell/mL. For transfection, liposome complex was prepared with 1 μg DNA for each mL of culture. For co-transfection of vectors coded with heavy and light chains separately, the vector ratio was set at 1:1 unless specified otherwise. “High Titer” or “Max Titer” expression protocols were followed after transfections, and cultures were harvested when cell viabilities dropped below 70%. Harvest was done by centrifugation at 300×g for 5 min at 20° C. Cells were discarded and the supernatant was centrifuged again at 4000× g for 30 mins at 4° C. The harvested supernatants were clarified by 0.2 μm filtration using PES membrane before freezing for storage.

[0525] Harvested samples could be enriched and buffer-exchanged by spin-columns or TFF cassette with nominal molecular size cut off of 5, 10 or 30 kDa.

[0526] For HIS-tagged column purification, the harvested supernatants were dialysed via SnakeSkin dialysis tube with nominal molecular size cut off 5, 10 or 30 kDa depending on the protein of interest. For large scale production, the supernatants were washed through a TFF cassette with a certain molecular size cut off membrane. Buffer-exchange to the desired column loading buffer also was achieved through the above-mentioned procedures to prepare the sample for the His-tagged column purification. The purification was performed on either a HisTrap excel column (Cytiva) or PureCube 100 Compact Cartridge Ni-INDOGO affinity Column (Cat #75302, Cube Biotech) or other equivalent column. Purification was performed on a AKTA Pure system (Cytiva) equipped with UV detector at 280 nm wavelength, conductivity detector and pH probe. Loading and washing buffer consisted of 50 mM Sodium Phosphate Monobasic and 0.3 M Sodium Chloride, pH 8.0. The elution buffer contained 500 mM Imidazole. The eluted protein was buffer exchanged to PBS using Vivaspin (Sartorius) and stored under 4° C.

[0527] Protein was quantified via Nanodrop at 280 nm wavelength and standard Bicinchoninic acid (BCA) protein assay. The protein purity was confirmed by SDS PAGE gel electrophoresis.

[0528] The detailed experimental data generated by the inventor(s) and described herein includes the generation of a wide variety of bridging molecules that include:
[0529] 1. Targeting moieties generated in multiple antibody formats, e.g. Fab and scFv;
[0530] 2. Various positioning of the dysfunctional P2X₇ receptor epitope moiety on the targeting moiety including, for example, on the V_{L} and V_{H};
[0531] 3. Inclusion of linkers between the targeting moiety and the dysfunctional P2X₇ receptor epitope moiety;
[0532] 4. Targeting moieties that bind to a wide range of cell surface antigens that are present on tumour cells from different tissue origins.

### Antibody/Fab Conjugation

[0533] Conjugation of BILO3s 2-2-1-Fc (an anti-nfP2X₇ receptor antibody) with fluorochrome Alexa Fluor® 647 (AF647) was performed according to manufacturer's instruction (Cat #A20186, ThermoFisher). The AF647 labelled BILO3s 2-2-1-Fc antibody was reconstituted in PBS, pH 7.2, with 2 mM sodium azide.

### Testing Binding of Bridging Molecules to Cells by Flow Cytometry

### Reagents

[0534] Abs and Fabs:
[0535] BILO3 pure antibody: prediluted to 100 ug/mL by PBS.
[0536] BILO3-AF647 antibody: prediluted to 100 ug/mL by PBS
[0537] Anti-His antibody-FITM (1 mgdmL) (Abcam Cat #abi206, Cat #GR3361939-1)
[0538] Rabbit IgG-FITC isotype control (Abcam Cat #ab3706, Cat #GR3356160-1)
[0539] Bridging molecules, generated in-house and harvested from supernatant see below

[0540] Cell lines used for binding assays: JeKo-1 (CD19, CD20, CD79B, CD37, CD22, ROR1, Her2), MOLM-13 (CD33, CD38, CD37, CD135, CD123), PC3 (Her2), MDA-MB-231 (EGFR, PD-L1), Raji (CD22, CD70, CD79B), Karpas299 (CD30), U937 (CD105), HL60, RPM18226 (BCMA, CD38, CD33).

[0541] Cells were resuspended at a density of in 5×10⁶ cells/ml and 100 μL aliquots used per well for staining (0.5×10⁶/sample for testing).

| | | | Growth | | Culture |
|---|---|---|---|---|---|
| Cell Line | Disease Type | Source | Properties | Subculture Ratio | Medium |
| MOLM-13 | Acute Myeloid | ATCC | Suspension | 4 × 10⁵-2 × 10⁶ | RPMI |
| | Leukaemia, AML | | | cells/mL | 1640 + |
| | | | | | 10% FBS |
| JeKo-1 | Mantle Cell | ATCC | Suspension | 2 × 10⁵-2 × 10⁶ | RPMI |
| | Lymphoma, MCL | | | cells/mL | 1640 + |
| | | | | | 20% FBS |
| MDA-MB | Mammary | NCI-60 | Adherent | 1:4 | Leibovitz's |
| 231 | | panel | | | L-15 |
| | | | | | medium + |
| | | | | | 10% FBS; |
| | | | | | RPMI1640 + |
| | | | | | 10% FBS |
| PC-3 | Prostate | CellBank | Adherent | 1:6 | F12K or |
| | | Australia | | | RPMI |
| | | | | | 1640 + |
| | | | | | 10% FBS |
| U937 | Histiocytic | CellBank | Suspension | 2 × 10⁵-9 × 10⁵ | RPMI |
| | Lymphoma | Australia | | cells/mL | 1640 + |
| | | | | | 2 mM |
| | | | | | Glutamine + |
| | | | | | 10% FBS |
| Raji | Burkitt's lymphoma | CellBank | Suspension | 3 × 10⁵-9 × 10⁵ | RPMI |
| | | Australia | | cells/mL | 1640 + |
| | | | | | 2 mM |
| | | | | | Glutamine + |
| | | | | | 10% FBS |
| HL-60 | Acute | NCI-60 | Suspension | 1 × 10⁵-1 × 10⁶ | IMDM + |
| | promyelocytic | panel | | cells/mL | 10% FBS |
| | leukaemia | | | | |
| RPMI- | Multiple Myeloma | NCI-60 | Semi adhesion | 5 × 10⁵-2 × 10⁶ | RPMI |
| 8226 | | panel | | cells/mL | 1640 + |
| | | | | | 10% FBS |
| Karpas299 | anaplastic large | CellBank | Suspension | 0.5-2 × 10⁶ | RPMI |
| | cell lymphoma | Australia | | cells/mL | 1640 + |
| | | | | | 2 mM |
| | | | | | Glutamine + |
| | | | | | 10-20% |
| | | | | | FBS |

### Procedure

### 1. Staining Condition List:

[0542] Bridging molecule binding to BILO3s Antibody Staining and His Tag Antibody detection

### Control Conditions:

[0543] Control bridging molecule binding to BILO3s Antibody Staining and His Tag Antibody detection
[0544] No bridging molecule binding to BILO3s Antibody Staining and His Tag Antibody detection
[0545] Unstained cells

### 2. Staining Procedure

[0546] Block the cells with human FcR blocker (20% v/v, Miltenyi) on ice for 10 min and wash off the unbounded FCR blocker.
[0547] Incubate the cells in 50 μL of crude prep supernatant and stain on ice for 15 min.
[0548] Wash the cell suspension by FACS buffer x2
[0549] Stain the cells with 1 μg/mL of BILO3s-AF647 and 1 μL of His Tag antibody per 100 μL cell suspension.
[0550] Wash the cells by FACS buffer x2.
[0551] Cells ready to be analysed on MacsQuant16.

### Lentiviral Vector Production Using Adherent Lenti-X HEK293T (Takara) Cells and PEI

### Lenti-X 293T Culture Media

[0552] For cell culture pre transduction:

[0553] 90% Dulbecco's Modified Eagle's Medium (DMEM) with high glucose (4.5 g/L), 4 mM L-glutamine, and sodium bicarbonate (Sigma-Aldrich, D5796); 10% Foetal Bovine Serum (FBS); 1 mM sodium pyruvate (Sigma-Aldrich, S8636).

### For Cell Culture Post Transduction:

[0554] 90% Dulbecco's Modified Eagle's Medium (DMEM) with high glucose (4.5 g/L), 4 mM L-glutamine, and sodium bicarbonate (Sigma-Aldrich, D5796); 10% Foetal Bovine Serum (FBS); 1 mM sodium pyruvate (Sigma-Aldrich, S8636), and 10 mM sodium butyrate.

| Plasmid DNA ID# | Construct Name |
|---|---|
| Transfer | Various |
| A | pRSV/REV (expresses HIV-1 REV) |
| B | pMDL/RRE (expresses HIV GAG/POL) |
| C | pMD2.G (expresses VSV glycoprotein) |

### Protocol, Part I Lenti-X 293T Cells Lentivirus Transfection

### Day 0:

[0555] 1. Seed 1.7×10⁶ cells per 15 cm dish so that they will be ˜80% confluent on the day of transfection—the following Monday (˜16×10⁶ cells).

### Day 1:

[0556] 1. Check cells under microscope. The cells should be about 75-90% confluent.
[0557] 2. Gently aspirate media, add 20 mL fresh DMEM supplemented with 10% FCS to each 15 cm dish, and incubate for at least two hours before transfection.
[0558] 3. Perform the transfection procedure in the afternoon (˜2.30-4.30 pm). Warm an aliquot of serum-free DMEM to 37° C.
[0559] 4. Prepare the Mixture A (Plasmid DNA solution) and Mixture B (PEIpro solution).
[0560] 5. Determine the required volumes of DMEM and plasmid DNA in Mixture A according to the table below.

| | | | | |
|---|---|---|---|---|
| | T175 or 15 cm | T75 | 10 cm dish | 6 well |
| Mixture A (DNA) | dish (175 cm²) | (75 cm²) | (60 cm²) | (9.6 cm²) |

| | |
|---|---|
| Plasmid DNA* | VSV-G 0.06 μg/cm² |
| | Rev 0.06 μg/cm² |
| | Gag/pol 0.12 μg/cm² |
| | Transfer plasmid 0.08 μg/cm² |
| DMEM (w/o | 5% final culture volume |
| additives) | |

[0561] 6. Determine the volumes required for each plasmid DNA component for the number of plates required. 15 cm dish has an area of ˜175 cm².

| | μg/plate | | μg/plate | |
|---|---|---|---|---|
| Mixture A | CCT | #_{——}_{——}_{——}plates | VGEF | #_{——}_{——}_{——}plates |
| Transfer plasmid | 14 | | 2 | |
| pMDL/RRE | 21 | | 7.5 | |
| pRSV/REV | 10.5 | | 7.5 | |
| pMD2.G | 10.5 | | 5 | |
| DMEM high | 0.75 mL | | 0.75 mL | |
| glucose (w/o | | | | |
| additives) | | | | |

[0562] 7. Determine the volumes required for each component of Mixture B (PEIpro solution).
[0563] For each 15 cm dish,

| Mixture B | | μL/plate | | | μL/plate | | |
|---|---|---|---|---|---|---|---|
| (PEIpro) | | CCT | | #_{——}_{——}_{——}plates | VGEF | | #_{——}_{——}_{——}plates |
| PEIpro | PEIpro:DNA = | 56 | uL | | 22 | uL | |
| 1 mg/mL | 1:1 ratio | | | | | | |
| DMEM high | | 0.75 | mL | | 0.75 | mL | |
| glucose | | | | | | | |
| (w/o | | | | | | | |
| additives) | | | | | | | |

[0564] 8. Vortex PEIpro for 5 seconds and then spin down if needed to collect liquid in the bottom of the tube.
[0565] 9. Prepare Mixture B (PEIpro in media) in a 15 mL tube by adding PEIpro into the DMEM high glucose without any additives. Add PEI into DMEM Invert up and down a few times and spin down quickly.
[0566] 10. Prepare Mixture A (plasmid DNA dilution in media) in a 50 mL conical tube by adding DNA into the media. Mix gently by inverting up and down and spin down quickly.
[0567] 11. Mix and prepare transfection mixture (PEIpro/DNA solution) by adding Mixture B (PEIpro solution) to Mixture A (plasmid DNA dilution). Using a p1000 micropipette, add the PEIpro solution dropwise to DNA solution and immediately invert 3-4 times to mix. Do not vortex.
[0568] 12. Incubate at room temperature for 15 min, no longer than 30 min. Do not agitate the tube during this time.
[0569] 13. After the 15-min incubation, add the transfection mixture to the flasks/dishes containing cells and fresh media (dropwise if possible). Mix by gently rocking the flask/dish horizontally with back and forth and left and right motions.
[0570] 14. Incubate the flasks/dishes at 37′C with 5% CO2 overnight.

### Day 2:

[0571] 15. 16-18 hours after transfection, replace media. Working with 2 plates at a time, aspirate old media. Using a 25 mL pipette, carefully add 15 mL fresh DMEM supplemented with 10% FCS, and 10 mM sodium butyrate.

[0572] Day 3 first harvest 24 hour post media change:
[0573] 16. Collect the supernatants from the culture flasks/dishes in 50 mL Falcon tubes. Carefully replace each plate with 15 mL fresh DMEM supplemented with 10% FCS and 10mMm sodium butyrate and return plates to incubator.
[0574] 17. Centrifuge the supernatant at 500×g for 10 min at 4 C (for concentration by Lenti-X concentrator). For ultracentrifugation, centrifuge at 3800 rpm for 30 min at RT.
[0575] 18. Draw up the virus-containing supernatant with a 20 mL syringe and filter through a 0.45 μm PES filter (Millipore) into a new 50 mL Falcon tube. This can be used as (a) Crude preparation for transduction, or proceed to (b) concentration by ultracentrifugation, or (c) concentration by Lenti-X concentrator. Alternatively, store crude virus 4′C overnight and pool with 48 hour harvest. Store concentrated virus in aliquots at −80° C. for extended periods.
[0576] 19. Discard plates, tubes and filters in a biohazard bag in the tissue culture hood. Seal the biohazard bag before taking it out of the hood for disposal.

[0577] Day 4 second harvest 48 hour post media change:
[0578] 20. Collect the supernatants from the culture flasks/dishes in 50 mL Falcon tubes.
[0579] 21. Centrifuge the supernatant at 2000×g for 30 min at room temp.
[0580] 22. Draw up the virus-containing supernatant with a 20 mL syringe and filter through a 0.45 μm filter (Millipore) into a new 50 mL Falcon tube. This can be pooled with the 24 hr harvest or process separately and proceed to (b) concentration by ultracentrifugation, or (c) concentration by Lenti-X concentrator.
[0581] 23. Discard plates, tubes and filters in a biohazard bag in the tissue culture hood. Seal the biohazard bag before taking it out of the hood for disposal.

### Part II Concentrating Lentiviruses by Lenti-X Concentrator

[0582] 24. Harvest the lentivirus-containing supernatants. Caution: supernatants contain live lentivirus. Pool similar stocks together, if desired. Centrifuge briefly at 500×g for 10 min or filter through a 0.45 μm filter.
[0583] 25. Transfer clarified supernatants to a sterile container and combine 1 volume of Lenti-X Concentrator with 3 volumes of clarified supernatant. Mix by gentle inversion. Larger volumes may be accommodated through the use of larger (i.e., 250 mL or 500 mL) centrifuge tubes.
[0584] 26. The incubation with the Lenti-X concentrator is done once. Either at harvest (after 1 day) or after 2 days (pooled harvest). Incubation at least for 30 min or overnight and then centrifugation of the pre-incubated fluid.
[0585] 27. Centrifuge samples at 1,500×g for 45 minutes at 4° C. After centrifugation, an off-white pellet will be visible.
[0586] 28. Carefully remove supernatant, taking care not to disturb the pellet. Residual supernatant can be removed with either a pipette tip or by brief centrifugation at 1,500×g.
[0587] 29. Gently resuspend the pellet in 1/10 to 1/100th of the original volume using complete DMEM, PBS, or TNE. The pellet can be somewhat sticky at first, but will go into suspension quickly.
[0588] 30. Immediately titrate sample or store at −80° C. in single-use aliquots.

### Car T Cell Generation Protocol

[0589] nfP2X₇ BRIDGE CAR T cells were generated by lentiviral transduction of CD4/CD8 positive selected T cells (1:1 ratio) via magnetic activated cell sorting (MACS) stimulated with TransAct (all according to manufacturer's instructions) cultivated in IL7/IL15 supplemented TecsMACS media (both 10 ng/mL). The donor source was a buffy coat.

[0590] CAR T cells were treated in the very same way but underwent lentiviral transduction to express the nfP2X₇ BRIDGE CAR. Activated untransduced T cells (aUT) do not express any receptor that can either engage with the EGFR nor the CD33 bridging molecules.

### Hypothesis:

[0591] nfP2X₇ BRIDGE CAR T cells have a superior effector function over aUT as they are redirected towards cancer cells directly via nfP2X₇ recognition on the cell surface of MOLM-13 leukaemic cells.

[0592] nfP2X₇ BRIDGE CAR T cells have a superior effector function over aUT as they are redirected towards cancer cells indirectly via nfP2X₇ E200 derived epitope on the CD33 Fab-bridging molecules on the surface of MOLM-13 leukaemic cells.

### Reagent and Equipment Preparation

[0593] CAR T culture medium: TexMACS with human IL-7 and IL-15. IL-7 stock concentration was 100 μg/mL, each vial has 55 μL. IL-15 stock concentration is 50 μg/mL, each vial had 55 μL.

[0594] For preparation of TexMACS with final concentration of 10 ng/mL of IL-7, 5 ng/mL of IL-15 and 3% FBS, add 50 ul of IL-7, 50 ul of IL-15 stock, and 15 mL FBS into each bottle (500 mL) of TexMACS medium. Label the date of adding of cytokines on the medium bottle.

[0595] Freezing medium preparation on the day of harvest: 10% of DMSO, 90% of FBS. Note: Add the reagent into 50 mL falcon tube according to the following order: DMSO to FBS.

### Part I: T Cell Activation and T Cell Transduction

[0596] Day 1: T cell activation
[0597] 1. CD4+ and CD8+ CAR T cells separation from whole blood or buffy coat. Refer to protocol of PBMC separation and CD4 and CD8 cell separation.
[0598] 2. Wash the CD4+ and CD8+ cells twice with pre-warmed TexMACS Medium (without supplement cytokines) by filling the falcon tube to the maximum volume and centrifuge at 300×g for 5 minutes. Aspirate supernatant completely.
[0599] 3. Resuspend the CD4+ and CD8+ cells in pre-warmed TexMACS medium supplemented with 10 ng/mL IL-7, 5 ng/mL IL-15 and 3% FBS to a final concentration of 10\hat{ }6 cells/mL.
[0600] 4. Plate the CD4+ cells and the CD8+ cells with a ratio of 1:1 by adding 0.5 ml of CD4+ cells and 0.5 mL of CD8+ cells into each well in a 24 well plate.
[0601] 5. Add 10 μL of T cell TransAct to a final dilution of 1:100 in the cell culture and carefully resuspend.
[0602] 6. Incubate for −36 hours at 37° C. with 5% CO₂ before transduction.

### Day 3: T Cell Transduction

[0603] 7. Use fresh viral vectors for transduction if possible. Otherwise, thaw slowly frozen viral vectors on ice.
[0604] 8. Remove 800 μL of the media slowly using a P1000 pipette from the side of the wells, taking care not to disrupt the bottom cell layer.
[0605] 9. Add in dropwise 150 μL (one plate's worth of viral vectors) or 300 μL (2 plates' worth of viral vectors) to the T cells. Top up the wells with fresh supplemented TexMACS media up to 600 μL and add polybrene to each well at a final concentration of 4 μg/mL. From this time onwards, the T cells should be kept in an incubator for lentiviral work only.
[0606] 10. After transduction, appropriate clean up procedures should be performed. Decontaminate the biosafety cabinet and the aspirator line by cleaning surfaces and running the line with 2% Virkon solution following by 70% ethanol. Dispose of contaminated waste, such as tips and serological pipettes etc. in a biohazard bag inside of the biosafety cabinet, seal the bag before taking the waste outside for disposal.

### Day 4 Onwards—T Cell Maintenance

[0607] 11. Transduced T cells were maintained at in IL-7, IL-15 and 3% FBS containing TexMACS media.
[0608] 12. Observe the T cell growth in the 24 well plate, transfer the cells to T75 flasks on day 2 post transduction.
[0609] 13. Monitor the lactate levels in the media using CCS Analyzer daily. Replenish fresh media if the lactate level is >10 mmol/L; Ideally, keep the lactate level <4 mmol/L.

[0610] Day 9−Day 5 post T cell transduction—Expression analysis

[0611] Transduced T cells are counted on day 5 using a flow cytometer. A sample is taken for flow cytometry analysis to determine expression efficiency based on a standard flow cytometry protocol.

### Luciferase Expressing Cancer Cell Line Generation

[0612] Firefly luciferase lentiviral transfer plasmids used for viral vector production:
[0613] pRRLsin18.cPPT.EF1a_firefly_luciferase_T2A_EGFP.WPRE
[0614] pRRLsin18.cPPT.hPGK_firefly_luciferase_T2A_EGFP.WPRE

[0615] 1. Plate cells at a density of 300,000 cells/well in a 24-well plate in a total volume of 850 μL.

[0616] 2. Viral vectors containing the firefly luciferase gene are produced using a 4-plasmid transfection protocol as described in the lentiviral production section. Use fresh concentrated viral vectors for transduction if possible. Otherwise, thaw slowly frozen viral vectors on ice.

[0617] 3. Add in dropwise 150 μL (one plate's worth of viral vectors) to the cells. From this time onwards, the cell should be kept in an incubator for lentiviral work only.

[0618] 4. Incubator cells at 37° C. with 5% CO₂.

[0619] 5. After transduction, appropriate clean up procedures should be performed. Decontaminate the biosafety cabinet and the aspirator line by cleaning surfaces and running the line with 2% Virkon solution following by 70% ethanol. Dispose of contaminated waste, such as tips and serological pipettes etc. in a biohazard bag inside of the biosafety cabinet, seal the bag before taking the waste outside for disposal.

[0620] 6. On day 2 post transduction, transfer cells to T25 flasks.

[0621] 7. On day 5 post transduction, count cells and take a sample for expression analysis by flow cytometry.

[0622] 8. On day 7 post transduction, transduced cells are bulk sorted based on eGFP expression using a live cell sorter.

[0623] 9. After expansion, bulk sorted cells are further sorted by single cell clones. Single cell clones are grown, expanded and frozen down to make stocks.

### Functional Assays

[0624] Target cells constitutively expressing firefly luciferase and eGFP (sorted and grown as single cell clones defined as high performance cell lines) were used in the functional assays to measure viability via bioluminescence and/or fluorescence. The amount of light emitted correlates to the total number of cells in bioluminescence and the fluorescent target cells identified via flow cytometry correlate with the total number of cells alive.

[0625] Effector and target cells were seeded according to indicated effector to target ratio (ET). The indicated ET ratio, e.g. 10:1 is always referred to the total number of T cells and the total number of target cells. As the CAR expressing fraction is different from the total number of T cells the ET ratio referred to the CAR expressing cells is indicated separately. Target cells were seeded with 25,000 or 50,000 cells per 96 well plate.

### Luciferase Killing Assay

[0626] Effector and target cells were seeded according to indicated effector to target ratios (ET). The BRIDGE molecules were added in the indicated format (Fab, IgG1) at the indicated concentrations. D-luciferin was added and bioluminescence was measured at the indicated time points after incubation was started under standard conditions in incubators at 37° C. and 5% CO₂ on a SpectraMaxi3.

[0627] Viability of cells was calculated according to a serial dilution derived bioluminescence activity curve of cells (100%, 75%, 50%, 25%, 10% and 0% target cells) and depicted in percent viable cells. In general, the lysis was calculated by (bioluminescence of testing condition−0% bioluminescence)/(100% bioluminescence−0% bioluminescence).

### Flow Based Kill Assay

[0628] Effector and target cells were seeded according to indicated effector to target ratios (ET), the BRIDGE molecules were added in the indicated format (Fab, IgG1) at the indicated concentrations. Cell number was measured at the indicated time points (24h or 48h) after incubation was started under standard conditions in incubators at 37° C. and 5% CO₂ on a MACSQuant16 flow cytometer according to standard protocols. The staining of cells included a viability dye to exclude all dead cells from the analysis. T cells were clearly differentiated from eGFP positive cancer cells via CD3. Further T cells were characterised by CD25 and CD69 as a measure for specific T cell activation according to standard protocols after 24h or 48 h. The final data analysis was performed by FlowJo10.

Antibody cocktail

| Channel | Antibody | Source | Cat# |
|---|---|---|---|
| R1 | CD3 APC | Miltenyi | 130-113-135 |
| R3 | CD25 APCVio770 | Miltenyi | 130-123-469 |
| V2 | CD69 VioGreen | Miltenyi | 130-112-611 |
| B1 | eGFP | Constitutive stable | Target cell marker |
| | | expression | |
| V1 | Viobility405/452 | Miltenyi | 130-109-816 |

### Flow Based Acquisition of Cytokine Secretion

[0629] Effector and target cells were seeded according to indicated effector to target ratios (ET), the BRIDGE molecules were added in the indicated format (Fab, IgG1) at the indicated concentrations. Supernatant was collected after 24h or 48h and measured at the indicated time points after incubation was started under standard conditions in incubators at 37° C. and 5% CO₂ on a MACSQuant16 flow cytometer according to standard protocols using the Miltenyi cytokine beads. The final data analysis was performed by FlowJo10.

### Example 2—Characterisation of Various Bridging Molecules

[0630] The results in FIGS. 4 to 7 show that bridging molecules comprising a targeting moiety in the form of a Fab or scFv (FMC63 clone; amino acid sequences described herein) that can bind to CD19, binds to CD19 on the surface of live cells and can present the dysfunctional P2X₇ receptor epitope moiety (e.g. E200 moiety) such that it is accessible by an anti-P2X₇ receptor antibody (BILO3s 2-2-1-Fc). The location of the dysfunctional P2X₇ receptor epitope moiety can vary and the targeting moiety can still bind to its target cell surface antigen and the dysfunctional P2X₇ receptor epitope moiety is still available for binding to an antibody. Note that BILO3s 2-2-1-Fc-AF647/HIS-FITC did not bind to control bridging molecules that did not contain the dysfunctional P2X₇ receptor epitope moiety, nor did the anti-HIS antibody bind to control bridging molecules that did contain a HIS tag (data not shown).

### Fab Format+/−Linker—Epitope on V_{H}

[0631] FIG. 4 shows that bridging molecules in Fab format with a single E200 epitope either directly linked to the V_{H} or via a linker binds to CD19 on JeKo-1 (mantle cell lymphoma) cell line and the E200 epitope is available for binding to an antibody.

### Scfv Format+/−Linker—Epitope on V_{H}

[0632] FIG. 5 shows that bridging molecules in scFv format with a single E200 epitope either directly linked to the V_{H} or via a linker binds to CD19 on JeKo-1 (mantle cell lymphoma) cell line and the E200 epitope is available for binding to an antibody.

### Fab Format+/−Linker—Epitope on V_{L}

[0633] FIG. 6 shows that bridging molecules in Fab format with a single E200 epitope either directly linked to the V_{L} or via a linker binds to CD19 on JeKo-1 (mantle cell lymphoma) cell line and the E200 epitope is available for binding to an antibody.

### Scfv Format+/−Linker—Epitope on V_{L}

[0634] FIG. 7 shows that bridging molecules in scFv format with a single E200 epitope either directly linked to the V_{L} or via a linker binds to CD19 on JeKo-1 (mantle cell lymphoma) cell line and the E200 epitope is available for binding to an antibody.

### Bridging Molecules Targeting Various Antigens

[0635] FIG. 8: Binding of bridging molecules to various antigens CD37, CD79B, ROR1, CD33, CD38, CD123, CD135, BCMA, EGFR, PDL1, CD22, CD70 and CD20. (a), (c), (e), (g), (i), (k), (m), (o), (q), (s), (u), (w) and (y) show anti-HIS antibody binding, (b), (d), (f), (h), (j), (1), (n), (p), (r), (t), (v), (x) and (z) show binding of antibody to dysfunctional P2X₇ receptor epitope.

[0636] CD37 targeting moieties derived from otlertuzumab, CD79B targeting moieties derived from polatuzumab, ROR1 targeting moieties derived from ROR1 APC (WO2016016344A1_D10v3), CD33 targeting moieties derived from lintuzumab, CD38 targeting moieties derived from daratumumab, CD123 targeting moieties derived from clone 32716, CD135 targeting moieties derived from 4G8, BCMA targeting moieties derived from clone CA8 J9M0, EGFR targeting moieties derived from necitumumab or matuzumab, PDL1 targeting moieties derived from atezolizumab, CD22 targeting moieties derived from m971-L7 (or inotuzumab (data not shown)), CD70 targeting moieties derived from cusatuzumab, CD19 targeting moieties derived from tafasitamab, CD20 targeting moieties derived from ofatumumab (or ocrelizumab (data not shown)). Exemplary amino acid sequences of bridging molecules targeting these antigens and derived from the antibodies mentioned immediately above are described in the sequence information table herein.

[0637] FIG. 8 shows binding of various bridging molecules to JeKo-1 (MCL) wild type cell line (CD37, CD79B, ROR1) Raji (Burkitt's lymphoma) wild type cell line (CD22, CD70, CD19, CD20, CD22), MOLM-13 (AML) wild type cell line (CD33, CD38, CD123 and CD135), RPMI 8226 (multiple myeloma) wild type cell line (CD33, BCMA and CD38), MDA-MB 231 (breast cancer) wildtype cell line (EGFR and PDL1) and PC-3 (prostate cancer) wild type cell line (EGFR).

### Example 3—Dose Dependent Increasing in Cell Binding by CD19 Targeting Bridging Molecule

[0638] JeKo-1 (MCL) CRL-3006™ wild type cell line purchased from ATCC as part of the NCI60 panel. The cells were cultured according to general recommendations and standards for this particular cell line.

[0639] FIG. 9 shows “painting” of JeKo-1 with CD19 targeted Fab bridging molecules in the illustrated format.

[0640] Cells were incubated at indicated concentrations with Fab bridging molecules.

[0641] CD33-targeted Fab-bridging molecules served as negative control in JeKo-1 at 10 ng/mL and 1000 ng/mL. CD19 targeted Fab-bridging molecule were used at 1 ng/mL, 10 ng/mL, 100 ng/mL and 1000 ng/mL.

[0642] The flow cytometric staining was undertaken in two steps according to standards in flow cytometric staining using the Fc block reagent (Miltenyi). First the target cells were incubated with Fab-bridging molecules at indicated concentrations for 15 min, washed three times and then the secondary antibodies anti-HIS FITC and the single domain antibody BIL03 2-2-1 AF647 was used at saturating concentrations (1 ug/mL) to indirectly stain the target cells via the 6×HIS and the nfP2X₇ E200 derived epitope on the bound Fab-bridging molecules. After 15 min of incubation the sample was washed and then analysed on a MACSQuant16 (Miltenyi). The flow data was analysed via FlowJo v10.7 (BD).

[0643] There is no expression of CD33 in JeKo-1 cells. CD19 staining showed increasing expression with increasing concentrations of CD19-targeted bridging molecules.

### Example 4—Dose Dependent Increase in Cell Binding by CD33 Targeting Bridging Molecule

[0644] MOLM-13 (AML) wild type cell line purchased from ATCC as part of the NCI60 panel. The cells were cultured according to general recommendations and standards for this particular cell line.

[0645] FIG. 10 “painting” of MOLM-13 with CD33 targeted Fab bridging molecules in the illustrated format.

[0646] Cells were incubated at indicated concentrations with Fab bridging molecules. CD19 targeted Fab bridging molecule served as negative control in MOLM-13 at 10 ng/mL and 1000 ng/mL, while CD33 targeted Fab-bridging molecule was used at 1 ng/mL, 10 ng/mL, 100 ng/mL and 1000 ng/mL.

[0647] The flow cytometric staining was undertaken in two steps according to standards in flow cytometric staining using the Fc block reagent (Miltenyi). First the target cells were incubated with Fab-bridging molecules at indicated concentrations for 15 min, washed three times and then the secondary antibodies anti-HIS FITC and the single domain antibody BIL03 2-2-1 AF647 was used at saturating concentrations (1 ug/mL) to indirectly stain the target cells via the 6×HIS and the nfP2X₇ E200 derived epitope on the bound Fab-bridging molecules. After 15 min of incubation the sample was washed and then analysed on a MACSQuand16 (Miltenyi). The flow data was analysed via FlowJo v10.7 (BD).

[0648] There is no expression of CD19 in MOLM-13 cells. CD33 staining showed increasing expression with increasing concentrations of CD33-targeted bridging molecules.

### Example 5—Detection of Marker Genes and Direct CAR Detection Via nfP2X₇ E200 Derived Peptide and Bridging Molecule

[0649] nfP2X₇ targeted bridging CAR effector cells (such as T cells or NK cells but not limited to) recognise cancer cells specifically. The epitope targeted in nfP2X₇ arises from a conformational change of the P2X₇ protein trimer and is exposed solely on cancer cells and not exposed on healthy cells.

[0650] The basic principle as well as the engagement of nfPX₇ CAR expressing effector cells via nfP2X₇ E200 derived peptide tagged bridging molecules and the different formats of bridging molecules is illustrated and outlined in FIGS. 1 to 3.

[0651] Thus using nfP2X₇ CAR in the absence of bridging molecules, the nfP2X₇ CAR expressing effector cells exhibit cancer-specific targeting.

[0652] In order to broaden the applicability to nfP2X₇ functionally negative cancers (very low or possibly negative for nfP2X₇) nfP2X₇ CAR expressing effector cells may be redirected to cancer cells via bridging molecules targeting cancer-associated antigens as illustrated for CD33 or cancer-specific antigens via TcR-like mAbs. The specificity of the bridging molecules is unlimited, which means any surface expressed target antigen or presented antigen in the context of MHC peptide presentation (class I and II) via TcR-like mAb or ligands may engage the nfP2X₇ bridging CAR expressing effector cells in the same mode of action.

[0653] In most cases, the dual-function of the nfP2X₇ bridging CAR expressing effector cells is utilised. It is a combination of scenario I and II which means that nfP2X₇ bridging CAR expressing effector cells are engaged directly to cancer cells via nfP2X₇ expressed on the cancer cells and additionally recruited to the cancer cells via bridging molecules targeting cancer-associated antigens as illustrated for CD33 or cancer-specific antigens via TcR-like mAbs.

### Example 6—“Painting” of MOLM-13 (AML) Wildtype Cell Line with CD33 Targeted Fab-Bridging Molecules

[0654] FIG. 11 illustrates the “painting” of MOLM-13 (AML) cells via CD33 targeted Fab-bridging molecules. The flow data shows isotype control (black), staining with BILO3s 2-2-1-Fc sd-mAb only at 1 ug/mL (blue) and the increase of staining via the combination of CD33 targeted Fab-bridging molecules and BILO3s 2-2-1-Fc (green). The increase of target molecules that can be recognised by the nfP2X₇ bridging CAR expressing effector cells translates into CAR-mediated effector function. The bridging technology therefore enhances the CAR function by increasing the targeting epitopes on the cancer cells.

### Example 7—Titration of CD33 Targeted Bridging Molecule Derived from Lintuzumab

[0655] MOLM-13 cells constitutively expressing Luciferase were co-incubated with increasing concentrations of CD33 targeted Fab-bridging molecules at the indicated concentrations. The Fab-bridging molecules bound to CD33 on MOLM-13 but do not exert any direct toxicity arising from complement-dependent cytotoxicity (CDC) or recruitment of effector cells (ADCC). No cells other than MOLM-13 were used in the assay. The CD33 targeted Fab-bridging molecules do not have any functional sites for CDC or ADCC like full-size antibodies.

[0656] There was no significant impact on viability at 4 hours and no consistent or dose-dependent toxicity after 24 hour incubation.

### Example 8—Activation of nfP2X₇ CAR-T Cells by CD33-Targeting Fab-Bridging Molecules

[0657] FIG. 12 shows a representative flow cytometric plot with direct comparison of untransduced T cells (left panel), CARCD07_hPGK (middle panel; CARCD07 is also referred to herein as CAR7) and CARCD07_EF1a (right panel; CARCD07 is also referred to herein as CAR7) expressing T cells. Both CAR T cells generated increased expression of the activation markers CD25 and CD69 in incubation with MOLM-13 at 20:1 ET ratio and CD33 targeted Fab-bridging molecules at 1000 ng/mL after 48 hours.

[0658] The CD33 Fab bridging molecule used in the experiments in Examples 8 and 9 was derived from Lintuzumab and the EGFR targeted bridging molecule derived from Necitumumab. The dysfunctional P2X₇ receptor epitope was linked directly to the V_{L} with a free N-terminus.

[0659] The CARCD07_hPGK CAR has the following domain structure from N-terminus to C-terminus: hPGK-CD8a SP-V_{H} BIL03 2-2-1-CD28-CD28T-CD28-CD137-CD3zeta-T2A-tEGFR.

[0660] CARCD07_EF1a CAR has the following domain structure from N-terminus to C-terminus: EF1a-CD8a SP-V_{H} BIL03 2-2-1-CD28-CD28T-CD28-CD137-CD3zeta-T2A-tEGFR.

### Example 9—Clearance of Leukaemic Cells by nfP2X₇ CAR-T Cells in the Presence of CD33 Bridging Molecules

[0661] The flow cytometric plots of T cells and MOLM-13 at 20:1 ET ratio and CD33 targeted Fab-bridging molecules at 1000 ng/mL after 48 hours (corresponding to FIG. 12) showed a complete clearance of leukaemic cells in the presence of CARCD07_hPGK and CARCD07_EF1a whereas there was no impact on leukaemic cell number in the untransduced T cells (FIG. 13).

[0662] FIG. 14 shows flow cytometric plots that illustrate the dose-dependent clearance of leukaemic cells at indicated concentrations of CD33 targeted Fab bridging molecule concentrations of CARCD07_EF1a containing T cells and MOLM-13 at 20:1 ET ratio after 48 hours. Concentrations as low as 40 ng/mL showed almost complete elimination of leukaemic cells and complete elimination of leukaemic cells at 200 and 1000 ng/mL.

[0663] Specific lysis of MOLM-13 leukaemic cells by CARCD07_hPGK T cells at an ET ratio of 20:1 after 48 hour incubation with and without EGFR and CD33 targeted bridging molecules at indicated concentrations is illustrated in FIG. 15(a). Significant lysis in a dose dependent manner was found for increasing concentrations (40, 200 and 1000 ng/mL) of CD33 targeted Fab bridging molecules.

[0664] Specific lysis of MOLM-13 leukaemic cells by CARCD07_hEF1a T cells at an ET ratio of 20:1 after 48 hour incubation with and without EGFR and CD33 targeted bridging molecules at indicated concentrations is illustrated in FIG. 15(b). Significant lysis in a dose-dependent manner was found for increasing concentrations (40, 200 and 1000 ng/mL) of CD33 targeted Fab bridging molecules.

[0665] In a titration experiment EGFR and CD33 targeted Fab-bridging molecules were used to test the impact on killing of MOLM-13 by CARCD07_hPGK (FIG. 16). There was a significant difference in the viability of MOLM-13 after 24 hour incubation at 10:1 ET ratio between EGFR targeted bridging molecules and CD33 targeted bridging molecules at 1000 ng/mL. Statistical analysis was done by t-test. Alternative representation of the data from FIG. 16, shown in FIG. 17. There was no significant difference in the titration of the EGFR bridging molecules (data not shown). There were significant differences in the titration of the CD33 bridging molecules. Statistical analyses were performed by One-Way ANOVA and post-hoc test Tukey.

[0666] In a titration experiment, EGFR and CD33 targeted Fab-bridging molecules were used to test the effect of CARCD07_hPGK on killing of MOLM-13 (FIG. 18). There was a significant difference in the viability of MOLM-13 after 24 hour incubation at 20:1 ET ratio between the condition with EGFR targeted bridging molecules and CD33 targeted bridging molecules at 200 ng/mL and 1000 ng/mL. Statistical analysis was done by t-test. Alternative representation of the data from FIG. 18, shown in FIG. 19. There was no significant difference in the titration of the EGFR bridging molecules (data not shown). There were significant differences in the titration of the CD33 bridging molecules. Statistical analyses were performed by One-Way ANOVA and post-hoc test Tukey.

[0667] In a titration experiment, EGFR and CD33 targeted Fab-bridging molecules were used to test the impact on killing of MOLM-13 by CARCD07_hPGK (FIG. 20). There was a significant difference in the viability of MOLM-13 after 48 hour incubation at 10:1 ET ratio between EGFR targeted bridging molecules and CD33 targeted bridging molecules at 200 ng/mL and 1000 ng/mL. Statistical analysis was performed by t-test.

[0668] In a titration experiment, EGFR and CD33 targeted Fab-bridging molecules were used to test the difference in killing of MOLM-13 by CARCD07_hPGK (FIG. 21). There was a significant impact on the viability of MOLM-13 after 48 hour incubation at 20:1 ET ratio between EGFR targeted bridging molecules and CD33 targeted bridging molecules at 200 ng/mL and 1000 ng/mL. Statistical analysis was performed by t-test.

[0669] In a titration experiment, EGFR and CD33 targeted Fab-bridging molecules were used to test the effect of CARCD07_EF1a on killing of MOLM-13 by (FIG. 22).

[0670] There was a significant difference in the viability of MOLM-13 after 24 hour incubation at 10:1 ET ratio between EGFR targeted bridging molecules and CD33 targeted bridging molecules at 200 ng/mL and 1000 ng/mL. Statistical analysis was done by t-test. Alternative representation of the data from FIG. 22, shown in FIG. 23. There was no significant difference in the titration of the EGFR bridging molecules (data not shown). There were significant differences in the titration of the CD33 bridging molecules. Statistical analyses were performed by One-Way ANOVA and post-hoc test Tukey.

[0671] In a titration experiment, EGFR and CD33 targeted Fab-bridging molecules were used to test the effect of CARCD07_EF1a on killing of MOLM-13 by (FIG. 24). There was a significant difference in the viability of MOLM-13 after 24 hour incubation at 20:1 ET ratio between the EGFR targeted bridging molecules and CD33 targeted bridging molecules at 40 ng/mL, 200 ng/mL and 1000 ng/mL. Statistical analysis was done by t-test. An alternative representation of the data from FIG. 24 is shown in FIG. 25. There was no significant difference in the titration of the EGFR bridging molecules (data not shown). There were significant differences in the titration of the CD33 bridging molecules. Statistical analyses were performed by One-Way ANOVA and post-hoc test Tukey.

[0672] In a titration experiment EGFR and CD33 targeted Fab-bridging molecules were used to test the impact on killing of MOLM-13 by CARCD07_EF1a (FIG. 26). There was a significant impact on the viability of MOLM-13 after 48 hour incubation at 10:1 ET ratio between the condition with EGFR targeted bridging molecules and CD33 targeted bridging molecules at 40 ng/mL, 200 ng/mL and 1000 ng/mL. Statistical analysis was performed by t-test.

[0673] In a titration experiment, EGFR and CD33 targeted Fab-bridging molecules were used to test the effect of CARCD07_EF1a on killing of MOLM-13 by (FIG. 27). There was a significant difference in the viability of MOLM-13 after 48 hour incubation at 20:1 ET ratio between the EGFR targeted bridging molecules and CD33 targeted bridging molecules at 40 ng/mL, 200 ng/mL and 1000 ng/mL. Statistical analysis was performed by t-test.

[0674] In a titration experiment, EGFR targeted Fab-bridging molecules were used to test the effect of untransduced T cells, CARCD07_hPGK and CARCD07_EF1a effector cells on the killing of MOLM-13 at an ET ratio 10:1 after 24 hour incubation. There was no significant difference in the titration of the EGFR bridging molecules between the three effector cell populations (data not shown).

### Example 10—Activation of Various nfP2X₇ CAR-T Cells by CD33-Targeting Fab-Bridging Molecules-Titration

[0675] In a flow based assay, activation was assessed by measuring the up-regulation of CD25 and CD69 expression on MOLM-13 induced by untransduced T cells, and CARCD07_hPGK and CARCD07_EF1a expressing T cells at a 20:1 ET ratio after 48 hour incubation both with and without EGFR or CD33 targeted Fab-bridging molecules.

[0676] Both the CARCD07_hPGK as well as CARCD07_EF1a expressing T cells showed a significantly increased expression of the activation markers CD25 and CD69 in the presence of EGFR and the CD33 bridging molecules compared to untransduced T cells (data not shown).

### Example 11—Cell Killing by Various nfP2X₇ CAR-T Cells in the Presence of CD33-Targeting Fab-Bridging Molecules—Titration

[0677] In a cell killing assay, cytotoxicity was measured by quantification of residual leukaemic cells compared with a control. Elimination of leukaemic cells at concentrations of 40, 200 and 1000 ng/mL of the EGFR bridging molecules showed there was no significant difference between untransduced T cells compared with CAR T cells (FIG. 28(a)). However, the elimination of leukaemic cells in the presence of CD33 bridging molecules at the same concentrations of 40, 200 and 1000 ng/mL showed a significant difference between untransduced T cells compared with both CARCD07 transduced T cells (hPGK and EF1a) (FIG. 28(b)).

### Example 12—Cell Killing by Various nfP2X₇ CAR-T Cells in the Presence of CD33-Targeting Fab-Bridging Molecules'Titration

[0678] In a titration experiment, CD33 targeted Fab-bridging molecules were used to test the effect of untransduced T cells, CARCD07_hPGK and CARCD07_EF1a effector cells on the killing of MOLM-13 by at an ET ratio of 10:1 after 48 hour incubation (FIG. 29). There was a consistent significant difference observed between the three effector cell populations resulting from titrating the CD33 bridging molecules over the concentration range 40 ng/mL, 200 ng/mL and 1000 ng/mL (FIG. 30). Statistical analysis was done by One-Way ANOVA and post-hoc test Tukey to compare the effects of the named three effector cell types compared with the concentration of EGFR bridging molecules.

[0679] In a titration experiment, CD33 targeted Fab-bridging molecules were used to test the effect of untransduced T cells, CARCD07_hPGK and CARCD07_EF1a effector cells on the killing of MOLM-13 at an ET ratio of 20:1 after 48 hour incubation (FIG. 31). There was a consistent significant difference observed between the three effector cell populations resulting from titrating the CD33 bridging molecules over the concentration range 40 ng/mL, 200 ng/mL and 1000 ng/mL (FIG. 32). Statistical analyses were performed by One-Way ANOVA and post-hoc test Tukey to compare the effects of the named three effector cell types compared with the concentration of EGFR bridging molecules.

### Example 13—Cell Killing by nfP2X₇ CAR-T Cells in the Presence of CD19-Targeting Bridging Molecules in Fab and IgG1 Format and with Different Dysfunctional P2X₇ Receptor Epitope Moieties

[0680] Bridging molecules were generated with CD19 binding targeting moieties in different formats'Fab and IgG1. Moreover, those bridging molecules in those different formats were generated with different dysfunctional P2X₇ receptor epitope moieties.

[0681] In these experiments the nfP2X₇ CAR was as per CARCD07_EF1a CAR but with a CD8alpha spacer between the V_{H} BIL03 2-2-1 and the CD28TM (described herein as CAR10).

[0682] These CD19 targeted Fab or IgG1-bridging molecules were used to test the impact on killing of JeKo-1 by CAR10 (FIG. 33; Fab formats shown in (a), IgG1 formats shown in (b)). There was a significant difference in the viability of JeKo1 after, at least, a 24 hour incubation at 10:1 ET ratio between all CD19 targeted bridging molecules at 100 ng/mL that contain a dysfunctional P2X₇ receptor epitope moiety (ie OR19_8, 10 and 11) compared with the control bridging molecule that does not have a dysfunctional P2X₇ receptor epitope moiety (OR19_7). Statistical analysis was performed by One-Way ANOVA and post-hoc test Tukey. There was no significant difference in the titration of the CD19 bridging molecules containing a dysfunctional P2X₇ receptor epitope moiety. Similar results were achieved with other nfP2X₇ CARs (data not shown).

[0683] These data show that the cell killing of CAR-T cells can be potentiated significantly by bridging molecules irrespective of targeting moiety format and dysfunctional P2X₇ receptor epitope moiety.

### Example 14—Cell Killing by nfP2X₇ CAR-T Cells in the Presence of CD19-Targeting Bridging Molecules in Fab Format and with Different Dysfunctional P2X₇ Receptor Epitope Moieties

[0684] Similar experiments were performed as described above in Example 13, however CD19 bridging molecules with a larger array of dysfunctional P2X₇ receptor epitope moieties were tested. As shown in FIG. 34, CD19 bridging molecules comprising a dysfunctional P2X₇ receptor epitope moiety significantly reduced the cell viability of the target JeKo-1 cells whereas the control bridging molecule without a dysfunctional P2X₇ receptor epitope moiety (OR19_7), did not.

[0685] A summary of the various Fab bridging molecules with different dysfunctional P2X₇ receptor epitope moieties (or the absence of) is shown below (all Fab light chains are paired with the Fab heavy chain described herein—CD19, tafasitamab, B020-2_HC, SEQ ID NO: 52/143)

TABLE 3

| | Fab Light | dysfunctional | |
|---|---|---|---|
| | chain | P2X₇ receptor | Moiety |
| Bridging | SEQ ID | epitope | SEQ ID |
| molecule | NO | moiety | NO |
| OR19_7 | 144 | None | — |
| OR19_8 | 144 | E200 (C to S) | 4 |
| OR19_9 | 144 | E200_G4S | 15 |
| OR19_10 | 144 | E200_3*G4S | 168 |
| OR19_11 | 144 | E200_extended | 10 |
| | | peptide 17 | |
| | | (27 aa) | |
| OR19_12 | 144 | E200_extended | 6 |
| | | peptide 17v2 | |
| | | (22 aa) | |
| OR19_13 | 144 | E200_extended | 17 |
| | | peptide 17v3 | |
| | | (24 aa) | |
| OR19_14 | 144 | E200_extended | 18 |
| | | peptide 17v4 | |
| | | (22 aa) | |
| OR19_15 | 144 | E200_extended | 19 |
| | | peptide 17v5 | |
| | | (19 aa) | |
| OR19_NEW_001 | 144 | E200_extended | 20 |
| | | peptide 17v6 | |
| | | (22 aa) | |
| OR19_NEW_002 | 144 | E200_extended | 21 |
| | | peptide 17v7 | |
| | | (25 aa) | |
| OR19_NEW_003 | 144 | E200_extended | 22 |
| | | peptide 17v8 | |
| | | (30 aa) | |
| OR19_NEW_004 | 144 | E200_extended | 23 |
| | | peptide 17v9 | |
| | | (35 aa) | |
| OR19_NEW_005 | 144 | E200_extended | 24 |
| | | peptide 17v10 | |
| | | (30 aa) | |
| OR19_NEW_006 | 144 | E200_extended | 25 |
| | | peptide 17v11 | |
| | | (32 aa) | |
| OR19_NEW_007 | 144 | E200_extended | 26 |
| | | peptide 17v12 | |
| | | (35 aa) | |
| OR19_NEW_008 | 144 | E200_extended | 27 |
| | | peptide 17v13 | |
| | | (25 aa) | |
| OR19_NEW_009 | 144 | E200_extended | 28 |
| | | peptide 17v14 | |
| | | (22 aa) | |
| OR19_NEW_010 | 144 | E200_extended | 29 |
| | | peptide 17v15 | |
| | | (30 aa) | |
| OR19_NEW_011 | 144 | E200_extended | 30 |
| | | peptide 17v16 | |
| | | (27 aa) | |
| OR19_NEW_012 | 144 | E200_2*G4S | 16 |

### Example 15—Cell Killing by Different nfP2X₇ CAR-T Cells in the Presence of CD19-Targeting Bridging Molecules in Fab or IgG Format

[0686] Similar experiments were performed as described above in Example 13, using CAR-T cells having one of three different CAR architectures. As shown in FIG. 35, three different CARs (CAR7, CAR10 and CAR16), when expressed on T cells, and in combination with CD19 bridging molecules comprising a dysfunctional P2X₇ receptor epitope moiety, significantly reduced the cell viability of the target JeKo-1 cells. In all experiments, the bridging molecule OR19_10 was used.

[0687] These results demonstrate that the bridging molecule system is effective at reducing cell viability when using CAR-T cells having differing CAR architectures.

### Example 16—Binding and Cell Killing Using Alternative Bridging Molecule Constructs

[0688] The inventors developed a further generation of bridging molecules, this time comprising IgG1 hinge regions in the region linking the E200 epitope to the targeting moiety. The sequences of the tumour-specific antigen epitope moiety of these bridging molecules is provided in SEQ ID NOs: 365 to 400 (correlating to epitope binding moiety of the bridges referred to as B1 to B36 in Table 4 below). The tumour-specific antigen epitope moieties were linked to anti-CD19 or anti-CD33 Fabs, as described herein in Table 1.

[0689] The bridging molecules were then assessed for their ability to bind both anti-nfP2X₇ CARs and target cells (ie cells expressing the antigen to which the targeting moiety is designed). As summarised in the table below, all anti-CD19 bridging molecules were determined to be able to specifically bind to Jeko-1 cells (expressing CD19) and to T cells expressing nfP2X₇ CAR (data shown for anti-CD19 bridging molecule only).

### Table 4: Binding Capacity of New CD19 BRIDGE Variants to the CD19 Positive Cell Line JeKo-1.

[0690] JeKo-1 cells were incubated with different CD19 BRiDGE variants at saturating concentrations. After thorough washing, either a secondary anti-HIS-tag antibody or a single-domain antibody BIL03s (conjugated with AF647) staining at saturating concentrations was used to semi-quantify the binding capacity to CD19 on JeKo-1. The MFI intensity correlates with the number of secondary bound antibodies bound to the CD19 BRiDGE variants that are only detected if they are bound to the JeKo-1 cells. MFI: median fluorescence intensity. BLitz: Bio-Layer interferometry (BLI) technology using HIS-tag identification tips. MFIR: median fluorescence intensity ratio corresponds to a relative index that is calculated by the testing condition MFI divded by the control MFI (HIS-tag or BIL03s) This corresponds to the MFI measured without the CD19 BRIDGE primary staining (=isotype control) and the testing condition with the CD19 BRIDGE and subsequent staining with the secondary antibody. The higher the MFIR, the stronger the binding. Targeting CD19 via a tafasitamab-based CD19 BRIDGE shows the highest binding capacity to CD19 with the original E200 BRIDGE.

| | MFI HisTag | MFI Bil03 | MFIR | MFIR BIL03 | | MFIR BIL03 to |
|---|---|---|---|---|---|---|
| | FITC | AF647 | HisTag FITC | AF647 | BLItz | HisTag |
| B1 | 3.21 | 3.19 | 4.168831169 | 6.934782609 | 0.1865 | 1.663483679 |
| B2 | 3.47 | 4.17 | 4.506493506 | 9.065217391 | 0.1861 | 2.011590026 |
| B3 | 3.63 | 5.43 | 4.714285714 | 11.80434783 | 0.2941 | 2.503952569 |
| B4 | 3.89 | 9.02 | 5.051948052 | 19.60869565 | 0.1344 | 3.881412764 |
| B5 | 3.4 | 5.5 | 4.415584416 | 11.95652174 | 0.2225 | 2.707800512 |
| B6 | 3.33 | 5.29 | 4.324675325 | 11.5 | 0.1863 | 2.659159159 |
| B7 | 3.31 | 7.57 | 4.298701299 | 16.45652174 | 0.2533 | 3.828254302 |
| B8 | 3.58 | 10.6 | 4.649350649 | 23.04347826 | 0.1661 | 4.956278844 |
| B9 | 3 | 4.82 | 3.896103896 | 10.47826087 | 0.2446 | 2.68942029 |
| B10 | 3.27 | 7.71 | 4.246753247 | 16.76086957 | 0.2415 | 3.946749103 |
| B11 | 3.08 | 6.43 | 4 | 13.97826087 | 0.2553 | 3.494565217 |
| B12 | 3.36 | 9.08 | 4.363636364 | 19.73913043 | 0.2533 | 4.523550725 |
| B13 | 2.99 | 5.28 | 3.883116883 | 11.47826087 | 0.2805 | 2.95594009 |
| B14 | 3.12 | 7.27 | 4.051948052 | 15.80434783 | 0.2564 | 3.900431996 |
| B15 | 2.91 | 8.58 | 3.779220779 | 18.65217391 | 0.1317 | 4.935454953 |
| B16 | 2.86 | 8.08 | 3.714285714 | 17.56521739 | 0.2583 | 4.72909699 |
| B17 | 2.98 | 9.3 | 3.87012987 | 20.2173913 | 0.1844 | 5.223956814 |
| B18 | 3.03 | 10.9 | 3.935064935 | 23.69565217 | 0.3574 | 6.021667384 |
| B19 | 2.7 | 4.9 | 3.506493506 | 10.65217391 | 0.2721 | 3.03784219 |
| B20 | 2.61 | 4.17 | 3.38961039 | 9.065217391 | 0.1823 | 2.674412794 |
| B21 | 2.56 | 4.06 | 3.324675325 | 8.826086957 | 0.2726 | 2.654721467 |
| B22 | 2.54 | 4.85 | 3.298701299 | 10.54347826 | 0.23 | 3.196251284 |
| B23 | 2.39 | 6.82 | 3.103896104 | 14.82608696 | 0.2123 | 4.776605421 |
| B24 | 2.47 | 8.45 | 3.207792208 | 18.36956522 | 0.216 | 5.726544622 |
| B25 | 2.32 | 5 | 3.012987013 | 10.86956522 | 0.2368 | 3.607571214 |
| B26 | 2.36 | 5.53 | 3.064935065 | 12.02173913 | 0.232 | 3.922347089 |
| B27 | 2.5 | 9.6 | 3.246753247 | 20.86956522 | 0.1628 | 6.427826087 |
| B28 | 2.38 | 8.78 | 3.090909091 | 19.08695652 | 0.2021 | 6.175191816 |
| B29 | 2.33 | 7.44 | 3.025974026 | 16.17391304 | 0.184 | 5.345027057 |
| B30 | 2.35 | 7.48 | 3.051948052 | 16.26086957 | 0.2042 | 5.328029602 |
| B31 | 2.13 | 5.83 | 2.766233766 | 12.67391304 | 0.25 | 4.581649316 |
| B32 | 2.3 | 8.99 | 2.987012987 | 19.54347826 | 0.1712 | 6.542816635 |
| B33 | 2.25 | 7.12 | 2.922077922 | 15.47826087 | 0.1655 | 5.297004831 |
| B34 | 2.19 | 7.04 | 2.844155844 | 15.30434783 | 0.2197 | 5.380980743 |
| B35 | 2.31 | 9.49 | 3 | 20.63043478 | 0.2333 | 6.876811594 |
| B36 | 2.29 | 9.15 | 2.974025974 | 19.89130435 | 0.2135 | 6.68834251 |
| CD19 | 2.67 | 11.6 | 3.467532468 | 25.2173913 | | 7.2724312 |
| PURIFIED | | | | | | |
| BRIDGE | | | | | | |
| NO BRIDGE | 0.77 | 0.46 | 1 | 1 | | |

Table 5: Binding Capacity of the New CD19 BRIDGE Variants to nfP2X₇ CAR 1.

[0691] nfP2X₇ CAR T cells were incubated with different BRiDGE variants at saturating concentrations. After thorough washing, secondary anti-HIS-tag antibody staining at saturating concentrations was used to semi-quantify the binding capacity of nfP2X₇ CAR T cells to the E200 tag variant on the CD19 BRiDGE. The MFI intensity correlates with the number of secondary bound antibodies bound to the BRiDGEs that are only detected if they are bound to the CAR T cells. EGFR was used as a marker gene to detect the CAR expression. Thus, the EGFR+ T cell population was defined as the CAR expressing cells and the EGFR− T cell population was defined as the CAR negative subset. MFI: median fluorescence intensity. EGFR: epidermal growth factor receptor. BLItz: Bio-Layer interferometry (BLI) technology using HIS-tag identification tips. HIS-tag MFI Ratio: relative index that is calculated by the testing condition MFI divided by the control MFI, which corresponds to the MFI measured on EGFR+ T cells (defined as CAR positive cells) divided by the MFI measured on the EGFR− T cells (defined as CAR negative cells). Only CAR positive cells should be able to specifically bind the BRiDGE molecules via the E200 tag (nfP2X₇-derived CAR targeted epitope). The higher the MFIR, the stronger the binding. Some of the new BRiDGE variants lead to a significantly improved binding to the nfP2X₇ targeted CAR.

TABLE 6
Binding capacity of new the CD33 BRiDGE variants to the CD33 positive cell line MOLM-13.

| | | | | HisTag MFI | |
|---|---|---|---|---|---|
| | MFI HisTag FITC | MFI HisTag | HisTag MFI | Ratio | |
| | in EGFR+ | FITC in EGFR− | Ratio of | (background | |
| | Population | Population | EGFR+/EGFR− | 0.44) | BLItz |
| B1 | 2.1 | 0.52 | 4.0 | 4.8 | 0.1865 |
| B2 | 2.07 | 0.51 | 4.1 | 4.7 | 0.1861 |
| B3 | 2.05 | 0.5 | 4.1 | 4.7 | 0.2941 |
| B4 | 2.05 | 0.5 | 4.1 | 4.7 | 0.1344 |
| B5 | 2.08 | 0.5 | 4.2 | 4.7 | 0.2225 |
| B6 | 1.99 | 0.49 | 4.1 | 4.5 | 0.1863 |
| B7 | 2.22 | 0.55 | 4.0 | 5.0 | 0.2533 |
| B8 | 2.53 | 0.58 | 4.4 | 5.8 | 0.1661 |
| B9 | 2.32 | 0.56 | 4.1 | 5.3 | 0.2446 |
| B10 | 2.26 | 0.53 | 4.3 | 5.1 | 0.2415 |
| B11 | 2 | 0.5 | 4.0 | 4.5 | 0.2553 |
| B12 | 2.12 | 0.51 | 4.2 | 4.8 | 0.2533 |
| B13 | 2.13 | 0.52 | 4.1 | 4.8 | 0.2805 |
| B14 | 2.41 | 0.54 | 4.5 | 5.5 | 0.2564 |
| B15 | 2.61 | 0.54 | 4.8 | 5.9 | 0.1317 |
| B16 | 2.34 | 0.51 | 4.6 | 5.3 | 0.2583 |
| B17 | 2.25 | 0.53 | 4.2 | 5.1 | 0.1844 |
| B18 | 2.25 | 0.53 | 4.2 | 5.1 | 0.3574 |
| B19 | 2.16 | 0.53 | 4.1 | 4.9 | 0.2721 |
| B20 | 2.11 | 0.51 | 4.1 | 4.8 | 0.1823 |
| B21 | 2.19 | 0.54 | 4.1 | 5.0 | 0.2726 |
| B22 | 2.21 | 0.55 | 4.0 | 5.0 | 0.23 |
| B23 | 2.34 | 0.53 | 4.4 | 5.3 | 0.2123 |
| B24 | 2.13 | 0.54 | 3.9 | 4.8 | 0.216 |
| B25 | 2.28 | 0.57 | 4.0 | 5.2 | 0.2368 |
| B26 | 2.17 | 0.52 | 4.2 | 4.9 | 0.232 |
| B27 | 2.35 | 0.57 | 4.1 | 5.3 | 0.1628 |
| B28 | 2.24 | 0.53 | 4.2 | 5.1 | 0.2021 |
| B29 | 2.25 | 0.54 | 4.2 | 5.1 | 0.184 |
| B30 | 2.12 | 0.49 | 4.3 | 4.8 | 0.2042 |
| B31 | 2.67 | 0.68 | 3.9 | 6.1 | 0.25 |
| B32 | 2.61 | 0.66 | 4.0 | 5.9 | 0.1712 |
| B33 | 2.39 | 0.61 | 3.9 | 5.4 | 0.1655 |
| B34 | 2.41 | 0.56 | 4.3 | 5.5 | 0.2197 |
| B35 | 2.51 | 0.61 | 4.1 | 5.7 | 0.2333 |
| B36 | 2.41 | 0.58 | 4.2 | 5.5 | 0.2135 |
| CD19 PURIFIED | 1.2 | 0.44 | 2.7 | 2.7 | |
| BRIDGE | | | | | |
| NO BRIDGE | 0.62 | 0.35 | 1.8 | | |

[0692] MOLM-13 cells were incubated with different CD33 BRIDGE variants at saturating concentrations. After thorough washing, secondary anti-HIS-tag antibody or single-domain antibody BIL03s (conjugated with AF647) staining at saturating concentrations was used to semi-quantify the binding capacity to CD33 on MOLM-13. The MFI intensity correlates with the number of secondary antibodies bound to the CD33 BRIDGE variants that are only detected if they are bound to the MOLM-13 cells. MFI: median fluorescence intensity. BLItz: Bio-Layer interferometry (BLI) technology using HIS-tag identification tips. MFIR: median fluorescence intensity ratio corresponds to a relative index that is calculated by the testing condition MF divided by the control MB (HIS-tag or BIL03s), which corresponds to the MFI measured without the CD33 BRIDGE primary staining (=isotype control) and the testing condition with CD33 BRIDGE and subsequent staining with the secondary antibody. The higher the MFIR, the stronger the binding. There is a significant increase in the BIL03s MFIR with the new BRIDGE variants compared to the old variants for the targeting of CD33 with lintuzumab-based BRIDGEs.

TABLE 7
Binding capacity of new CD33 BRIDGE variants to nfP2X₇ CAR 1.

| | MFI HisTag | MFI Bil03 | MFIR HisTag | MFIR BIL03 | | MFIR BIL03 |
|---|---|---|---|---|---|---|
| | FITC | AF647 | FITC | AF647 | BLItz | to HisTag |
| B1 | 6.11 | 25.6 | 9.119402985 | 40 | 0.1865 | 4.386252046 |
| B2 | 5.59 | 23.8 | 8.343283582 | 37.1875 | 0.1861 | 4.457177996 |
| B3 | 6.76 | 27.6 | 10.08955224 | 43.125 | 0.2941 | 4.274223373 |
| B4 | 5.53 | 24.3 | 8.253731343 | 37.96875 | 0.1344 | 4.600192134 |
| B5 | 5.86 | 24.8 | 8.746268657 | 38.75 | 0.2225 | 4.430460751 |
| B6 | 6.25 | 25.8 | 9.328358209 | 40.3125 | 0.1863 | 4.3215 |
| B7 | 5.52 | 24.7 | 8.23880597 | 38.59375 | 0.2533 | 4.684386322 |
| B8 | 6.53 | 29.7 | 9.746268657 | 46.40625 | 0.1661 | 4.761437596 |
| B9 | 6.33 | 28.7 | 9.447761194 | 44.84375 | 0.2446 | 4.746494866 |
| B10 | 6.86 | 31.4 | 10.23880597 | 49.0625 | 0.2415 | 4.791818513 |
| B11 | 7.39 | 34.2 | 11.02985075 | 53.4375 | 0.2553 | 4.844807172 |
| B12 | 6.08 | 26.9 | 9.074626866 | 42.03125 | 0.2533 | 4.631733141 |
| B13 | 6.78 | 28.5 | 10.11940299 | 44.53125 | 0.2805 | 4.400580752 |
| B14 | 6.68 | 28 | 9.970149254 | 43.75 | 0.2564 | 4.388098802 |
| B15 | 7.64 | 31.7 | 11.40298507 | 49.53125 | 0.1317 | 4.343709097 |
| B16 | 6.27 | 28.7 | 9.358208955 | 44.84375 | 0.2583 | 4.791915869 |
| B17 | 7.36 | 32.6 | 10.98507463 | 50.9375 | 0.1844 | 4.636973505 |
| B18 | 5.79 | 24.2 | 8.641791045 | 37.8125 | 0.3574 | 4.375539724 |
| B19 | 5.35 | 21.5 | 7.985074627 | 33.59375 | 0.2721 | 4.207067757 |
| B20 | 5.67 | 21.5 | 8.462686567 | 33.59375 | 0.1823 | 3.969631834 |
| B21 | 6.04 | 25.8 | 9.014925373 | 40.3125 | 0.2726 | 4.471750828 |
| B22 | 4.61 | 19.8 | 6.880597015 | 30.9375 | 0.23 | 4.496339479 |
| B23 | 6.82 | 28.3 | 10.17910448 | 44.21875 | 0.2123 | 4.344070748 |
| B24 | 6.25 | 26.7 | 9.328358209 | 41.71875 | 0.216 | 4.47225 |
| B25 | 7.29 | 28.5 | 10.88059701 | 44.53125 | 0.2368 | 4.092721193 |
| B26 | 5.75 | 25.9 | 8.582089552 | 40.46875 | 0.232 | 4.71548913 |
| B27 | 5.55 | 25.1 | 8.28358209 | 39.21875 | 0.1628 | 4.734515766 |
| B28 | 6.33 | 27.8 | 9.447761194 | 43.4375 | 0.2021 | 4.597650079 |
| B29 | 5.38 | 23.4 | 8.029850746 | 36.5625 | 0.184 | 4.553322491 |
| B30 | 6.29 | 27.9 | 9.388059701 | 43.59375 | 0.2042 | 4.643531399 |
| B31 | 7.09 | 30.3 | 10.58208955 | 47.34375 | 0.25 | 4.473950987 |
| B32 | 6.69 | 27.7 | 9.985074627 | 43.28125 | 0.1712 | 4.334594544 |
| B33 | 6.96 | 29.8 | 10.3880597 | 46.5625 | 0.1655 | 4.482309626 |
| B34 | 6.98 | 29.8 | 10.41791045 | 46.5625 | 0.2197 | 4.469466332 |
| B35 | 6.62 | 27.4 | 9.880597015 | 42.8125 | 0.2333 | 4.33298716 |
| B36 | 6.72 | 29 | 10.02985075 | 45.3125 | 0.2135 | 4.517764137 |
| CD33 | 7.12 | 11.6 | 10.62686567 | 18.125 | | 1.705582865 |
| PURIFIED | | | | | | |
| BRIDGE | | | | | | |
| NO BRIDGE | 0.67 | 0.64 | 1 | 1 | | |

[0693] nfP2X₇ CAR T cells were incubated with different BRiDGE variants at saturating concentrations. After thorough washing, secondary anti-HIS-tag antibody staining at saturating concentrations was used to semi-quantify the binding capacity of nfP2X₇ CAR T cells to the E200 tag variant on the CD33 BRiDGE. The MFI intensity correlates with the number of secondary bound antibodies bound to the BRiDGEs that are only detected if they are bound to the CAR T cells. EGFR was used as a marker gene to detect the CAR expression. Thus, the EGFR+ T cell population was defined as the CAR expressing cells and the EGFR− T cell population was defined as the CAR negative subset. MFI: median fluorescence intensity. EGFR: epidermal growth factor receptor. BLItz: Bio-Layer interferometry (BLI) technology using HIS-tag identification tips. HIS-tag MFI Ratio: relative index that is calculated by the testing condition MFI divided by the control MFI, which corresponds to the MFI measured on EGFR+ T cells (defined as CAR positive cells) divided by the MFI measured on the EGFR− T cells (defined as CAR negative cells). Only CAR positive cells should be able to specifically bind the BRiDGE molecules via the E200 tag (nfP2X₇-derived CAR targeted epitope). The higher the MFIR, the stronger the binding. Some of the new BRiDGE variants lead to a significantly improved binding to the nfP2X₇ targeted CAR.

| | | | | HisTag MFI | |
|---|---|---|---|---|---|
| | MFI HisTag | MFI HisTag | HisTag MFI | Ratio | |
| | FITC in EGFR+ | FITC in EGFR− | Ratio of | (background | |
| | Population | Population | EGFR+/EGFR− | 0.4) | BLItz |
| B1 | 1.08 | 0.44 | 2.5 | 2.7 | 0.1865 |
| B2 | 1.11 | 0.45 | 2.5 | 2.8 | 0.1861 |
| B3 | 1.04 | 0.44 | 2.4 | 2.6 | 0.2941 |
| B4 | 1.68 | 0.54 | 3.1 | 4.2 | 0.1344 |
| B5 | 1.4 | 0.5 | 2.8 | 3.5 | 0.2225 |
| B6 | 1.96 | 0.57 | 3.4 | 4.9 | 0.1863 |
| B7 | 1.45 | 0.49 | 3.0 | 3.6 | 0.2533 |
| B8 | 1.34 | 0.47 | 2.9 | 3.4 | 0.1661 |
| B9 | 1.16 | 0.42 | 2.8 | 2.9 | 0.2446 |
| B10 | 1.99 | 0.57 | 3.5 | 5.0 | 0.2415 |
| B11 | 1.2 | 0.45 | 2.7 | 3.0 | 0.2553 |
| B12 | 1.55 | 0.5 | 3.1 | 3.9 | 0.2533 |
| B13 | 1.35 | 0.47 | 2.9 | 3.4 | 0.2805 |
| B14 | 1.44 | 0.49 | 2.9 | 3.6 | 0.2564 |
| B15 | 1.5 | 0.49 | 3.1 | 3.8 | 0.1317 |
| B16 | 1.83 | 0.54 | 3.4 | 4.6 | 0.2583 |
| B17 | 1.58 | 0.5 | 3.2 | 4.0 | 0.1844 |
| B18 | 1.79 | 0.52 | 3.4 | 4.5 | 0.3574 |
| B19 | 1.29 | 0.45 | 2.9 | 3.2 | 0.2721 |
| B20 | 1.29 | 0.45 | 2.9 | 3.2 | 0.1823 |
| B21 | 1.14 | 0.41 | 2.8 | 2.9 | 0.2726 |
| B22 | 1.44 | 0.47 | 3.1 | 3.6 | 0.23 |
| B23 | 1.71 | 0.51 | 3.4 | 4.3 | 0.2123 |
| B24 | 1.82 | 0.52 | 3.5 | 4.6 | 0.216 |
| B25 | 1.82 | 0.54 | 3.4 | 4.6 | 0.2368 |
| B26 | 1.22 | 0.43 | 2.8 | 3.1 | 0.232 |
| B27 | 1.2 | 0.43 | 2.8 | 3.0 | 0.1628 |
| B28 | 1.58 | 0.49 | 3.2 | 4.0 | 0.2021 |
| B29 | 1.73 | 0.51 | 3.4 | 4.3 | 0.184 |
| B30 | 1.63 | 0.49 | 3.3 | 4.1 | 0.2042 |
| B31 | 1.34 | 0.45 | 3.0 | 3.4 | 0.25 |
| B32 | 1.59 | 0.48 | 3.3 | 4.0 | 0.1712 |
| B33 | 1.69 | 0.5 | 3.4 | 4.2 | 0.1655 |
| B34 | 1.31 | 0.43 | 3.0 | 3.3 | 0.2197 |
| B35 | 2.15 | 0.56 | 3.8 | 5.4 | 0.2333 |
| B36 | 1.65 | 0.5 | 3.3 | 4.1 | 0.2135 |
| CD33 PURIFIED | 1.58 | 0.4 | 4.0 | 4.0 | |
| BRIDGE | | | | | |
| NO BRIDGE | 0.23 | 0.4 | 0.6 | | |

[0694] Subsequently, the bridging molecules were assessed functionally, for their ability to induce cell death (cytotoxicity). Experiments conducted were similar to those described in Examples 11-15.

[0695] All bridging molecules tested demonstrated an ability to induce cell killing. Thus, the data indicate that the bridging molecule successfully re-directed anti-nfP2X₇ CAR T cells to either CD19 or CD33 antigen expressed by JeKo-1 cells or MOLM-13 cells, respectively. Representative data are shown in FIG. 36 (A: showing cell killing of JeKo-1 cells by anti-CD19 bridging molecule+anti-nfP2X₇ CAR T cells; B: showing cell killing of MOLM-13 cells by anti-CD33 bridging molecule+anti-nfP2X₇ CAR T cells).

### Example 17—In Vivo Efficacy of Two Component Therapeutic System of the Invention

[0696] 6-8-week-old NSG mice were inoculated with the single cell sorted reporter cell line JeKo-1_LUC_eGFP at 1×10⁶ cells per mouse via tail vein injection on day 0. On day 7, mice underwent bioluminescence imaging (BLI) to determine JeKo-1 engraftment. Further, BLI was used to quantify the leukaemic load and treatment was initiated on day 7.

[0697] Mice were divided into the following treatment groups:
[0698] 1. Tumour only (PBS)
[0699] 2. Activated untransduced T cells
[0700] 3. Bridging molecule (anti-CD19 Fab based on tafasitamab with E200 epitope)
[0701] 4. Activated untransduced T cells+bridging molecule
[0702] 5. T cells expressing 3rd generation anti-CD19-CAR (antigen binding domain
[0703] derived from FMC63 and having general CAR architecture of: CD8-CD28-41 BB-CD3ζ)
[0704] 6. T cells expressing anti-nfP2X₇ receptor CAR 1 (antigen binding domain 2-2-1)
[0705] 7. T cells expressing CAR1+bridging molecule
[0706] 8. T cells expressing anti-nfP2X₇ receptor CAR2 (anti-nfP2X₇ receptor CAR antigen
[0707] binding domain 2-2-1)
[0708] 9. T cells expressing CAR2+bridging molecule
[0709] 10. PBS control (duplicate)

[0710] On day 7, intraperitoneal administration of bridging molecule was commenced at a dose regimen of 3× per week at 50 μg per mouse in the indicated groups. Leukaemic burden was evaluated via BLI at the indicated time points and mouse blood was analysed on day 42 to detect cancer cells and immune cells in the circulating peripheral blood. The experimental design is illustrated in FIG. 37.

[0711] The bridging molecule used comprised similar architecture to the molecules described in Example 14 (ie, having a targeting moiety comprised of a Fab derived from tafasitamab), and a tumour-specific antigen epitope moiety comprising an E200 peptide based on the SEQ ID NO: 143 and 145.

[0712] The positive control (group 5) comprised T cells expressing a 3^{rd} generation anti-CD19 CAR. The CAR comprised an antigen binding domain derived from FMC63 as described elsewhere herein (eg SEQ ID NO: 31 without the 6×HIStag and 32 in light-heavy orientation) and having the domains CD8-CD8TM-CD28-41BB-CD3zeta, a commonly used conventional CAR domain structure.

[0713] The ability of the bridging molecule to redirect T cells expressing two different nfP2X₇ receptor CARs was assessed. Briefly nfP2X₇ receptor CAR1 and nfP2X₇ receptor CAR2 comprised the general structure of a CAR, as described above in example 8 (ie having an antigen binding domain comprising the 2-2-1 sdAb, capable of binding an E200 epitope).

[0714] FIG. 38 shows bioluminescence (as a marker of tumour burden) for each of the treatment groups. The results indicate that mice administered T cells expressing anti-nfP2X₇ receptor CAR+anti-CD19 bridging molecule, had similarly low levels of tumour burden as compared to mice that received T cells expressing an anti-CD19 CAR.

[0715] These results demonstrate that in an in vivo setting, the bridging molecules of the present invention can be used to redirect a CAR T cell to bind to an alternative target. In this case, CAR T cells directed to nfP2X₇ receptor were successfully redirected to the CD19 antigen on cancer cells and achieved similar levels of therapeutic efficacy as CAR T cells with an antigen binding domain for binding CD19.

The application's sequence listing, which the Patent Office published only in electronic form, follows.

SEQUENCE LISTING (406 sequences)

SEQ ID NO: 1 - protein, 595 aa, Homo sapiens [sequence omitted]

SEQ ID NO: 2 - protein, 17 aa, Artificial Sequence
  Exemplary E200 epitope
GHNYTTRNILPGLNITC

SEQ ID NO: 3 - protein, 16 aa, Artificial Sequence
  Variant E200 epitope peptide (E200')
GHNYTTRNILPGLNIT

SEQ ID NO: 4 - protein, 17 aa, Artificial Sequence
  E200 epitope Cys to Ser modification
GHNYTTRNILPGLNITS

SEQ ID NO: 5 - protein, 21 aa, Artificial Sequence
  Extended E200 Cys to Ser modification
GHNYTTRNILPGLNITSTFHK

SEQ ID NO: 6 - protein, 22 aa, Artificial Sequence
  Extended E200' Cys to Ser modification (22aa)
GHNYTTRNILPGLNITSTFHKT

SEQ ID NO: 7 - protein, 23 aa, Artificial Sequence
  Extended E200'' Cys to Ser modification
GHNYTTRNILPGLNITSTFHKTC

SEQ ID NO: 8 - protein, 16 aa, Artificial Sequence
  Pep16
DFPGHNYTTRNILPGC

SEQ ID NO: 9 - protein, 23 aa, Artificial Sequence
  Pep17
GHNYTTRNILPGLNITSTFHKTS

SEQ ID NO: 10 - protein, 27 aa, Artificial Sequence
  Extended Pep17 (27 aa)
GHNYTTRNILPGLNITSTFHKTSGSGK

SEQ ID NO: 11 - protein, 11 aa, Artificial Sequence
  Minimum sequence E200 peptide (target epitope)
NYTTRNILPGL

SEQ ID NO: 12 - protein, 15 aa, Artificial Sequence
  Exemplary E300 epitope
KYYKENNVEKRTLIK

SEQ ID NO: 13 - protein, 17 aa, Artificial Sequence
  Variant E300 epitope peptide(E30')
KYYKENNVEKRTLIKVF

SEQ ID NO: 14 - protein, 25 aa, Artificial Sequence
  Exemplary E200/E300 or composite epitope
GHNYTTRNILPGAGAKYYKENNVEK

SEQ ID NO: 15 - protein, 22 aa, Artificial Sequence
  E200_G4S
GHNYTTRNILPGLNITSGGGGS

SEQ ID NO: 16 - protein, 27 aa, Artificial Sequence
  E200_2xG4S
GHNYTTRNILPGLNITSGGGGSGGGGS

SEQ ID NO: 17 - protein, 24 aa, Artificial Sequence
  E200_extended peptide 17v3 (24 aa)
GHNYTTRNILPGLNITSTFHKTGS

SEQ ID NO: 18 - protein, 22 aa, Artificial Sequence
  E200_extended peptide 17v4 (22 aa)
GHNYTTRNILPGLNITSTFHGS

SEQ ID NO: 19 - protein, 19 aa, Artificial Sequence
  E200_extended peptide 17v5 (19 aa)
GHNYTTRNILPGLNITSGS

SEQ ID NO: 20 - protein, 22 aa, Artificial Sequence
  E200_extended peptide 17v6 (22 aa)
DFPGHNYTTRNILPGLNITSGS

SEQ ID NO: 21 - protein, 25 aa, Artificial Sequence
  E200_extended peptide 17v7 (25 aa)
DFPGHNYTTRNILPGLNITSGGGGS

SEQ ID NO: 22 - protein, 30 aa, Artificial Sequence
  E200_extended peptide 17v8 (30 aa)
DFPGHNYTTRNILPGLNITSGGGGSGGGGS

SEQ ID NO: 23 - protein, 35 aa, Artificial Sequence
  E200_extended peptide 17v9 (35 aa)
DFPGHNYTTRNILPGLNITSGGGGSGGGGSGGGGS

SEQ ID NO: 24 - protein, 30 aa, Artificial Sequence
  E200_extended peptide 17v10 (30 aa)
DFPGHNYTTRNILPGLNITSTFHKTSGSGK

SEQ ID NO: 25 - protein, 32 aa, Artificial Sequence
  E200_extended peptide 17v11 (32 aa)
DFPGHNYTTRNILPGLNITSTFHKTSGSGKGS

SEQ ID NO: 26 - protein, 35 aa, Artificial Sequence
  E200_extended peptide 17v12 (35 aa)
DFPGHNYTTRNILPGLNITSTFHKTSGSGKGGGGS

SEQ ID NO: 27 - protein, 28 aa, Artificial Sequence
  E200_extended peptide 17v13 (25 aa)
DFPGHNYTTRNILPGLNITSTFHGGGGS

SEQ ID NO: 28 - protein, 25 aa, Artificial Sequence
  E200_extended peptide 17v14 (22 aa)
GHNYTTRNILPGLNITSTFHGGGGS

SEQ ID NO: 29 - protein, 30 aa, Artificial Sequence
  E200_extended peptide 17v15 (30 aa)
DFPGHNYTTRNILPGLNITSTFHKTGGGGS

SEQ ID NO: 30 - protein, 27 aa, Artificial Sequence
  E200_extended peptide 17v16 (27 aa)
GHNYTTRNILPGLNITSTFHKTGGGGS

SEQ ID NO: 31 - protein, 229 aa, Artificial Sequence
  CD19 binder heavy chain CD19, FMC63, B001_Heavy Chain
EVKLQESGPGLVAPSQSLSVTCTVSGVSLPDYGVSWIRQPPRKGLEWLGVIWGSETTYYNSALKSRLTIIKDNSKSQVFLKMNSLQTDDTAIYYCAKHYYYGGSYAMDYWGQGTSVTVSSASTKGPSVFPLAPSSKSTSGGTAALGCLVKDYFPEPVTVSWNSGALTSGVHTFPAVLQSSGLYSLSSVVTVPSSSLGTQTYICNVNHKPSNTKVDKKVEPKSCHHHHHH

SEQ ID NO: 32 - protein, 216 aa, Artificial Sequence
  CD19 binder light chain CD19, FMC63, B001_Light Chain
DIQMTQTTSSLSASLGDRVTISCRASQDISKYLNWYQQKPDGTVKLLIYHTSRLHSGVPSRFSGSGSGTDYSLTISNLEQEDIATYFCQQGNTLPYTFGGGTKLEITKARTVAAPSVFIFPPSDEQLKSGTASVVCLLNNFYPREAKVQWKVDNALQSGNSQESVTEQDSKDSTYSLSSTLTLSKADYEKHKVYACEVTHQGLSSPVTKSFNRGEC

SEQ ID NO: 33 - protein, 246 aa, Artificial Sequence
  E200+CD19 binder CD19, FMC63, B002-1_Heavy Chain
GHNYTTRNILPGLNITSEVKLQESGPGLVAPSQSLSVTCTVSGVSLPDYGVSWIRQPPRKGLEWLGVIWGSETTYYNSALKSRLTIIKDNSKSQVFLKMNSLQTDDTAIYYCAKHYYYGGSYAMDYWGQGTSVTVSSASTKGPSVFPLAPSSKSTSGGTAALGCLVKDYFPEPVTVSWNSGALTSGVHTFPAVLQSSGLYSLSSVVTVPSSSLGTQTYICNVNHKPSNTKVDKKVEPKSCHHHHHH

SEQ ID NO: 34 - protein, 251 aa, Artificial Sequence
  E200+CD19 binder  CD19, FMC63, B002-2_Heavy Chain
GHNYTTRNILPGLNITSGGGGSEVKLQESGPGLVAPSQSLSVTCTVSGVSLPDYGVSWIRQPPRKGLEWLGVIWGSETTYYNSALKSRLTIIKDNSKSQVFLKMNSLQTDDTAIYYCAKHYYYGGSYAMDYWGQGTSVTVSSASTKGPSVFPLAPSSKSTSGGTAALGCLVKDYFPEPVTVSWNSGALTSGVHTFPAVLQSSGLYSLSSVVTVPSSSLGTQTYICNVNHKPSNTKVDKKVEPKSCHHHHHH

SEQ ID NO: 35 - protein, 233 aa, Artificial Sequence
  E200+CD19 binder CD19, FMC63, Light chain B003-1
GHNYTTRNILPGLNITSDIQMTQTTSSLSASLGDRVTISCRASQDISKYLNWYQQKPDGTVKLLIYHTSRLHSGVPSRFSGSGSGTDYSLTISNLEQEDIATYFCQQGNTLPYTFGGGTKLEITKARTVAAPSVFIFPPSDEQLKSGTASVVCLLNNFYPREAKVQWKVDNALQSGNSQESVTEQDSKDSTYSLSSTLTLSKADYEKHKVYACEVTHQGLSSPVTKSFNRGEC

SEQ ID NO: 36 - protein, 238 aa, Artificial Sequence
  E200+CD19 binder CD19, FMC63, Light chain B003-2
GHNYTTRNILPGLNITSGGGGSDIQMTQTTSSLSASLGDRVTISCRASQDISKYLNWYQQKPDGTVKLLIYHTSRLHSGVPSRFSGSGSGTDYSLTISNLEQEDIATYFCQQGNTLPYTFGGGTKLEITKARTVAAPSVFIFPPSDEQLKSGTASVVCLLNNFYPREAKVQWKVDNALQSGNSQESVTEQDSKDSTYSLSSTLTLSKADYEKHKVYACEVTHQGLSSPVTKSFNRGEC

SEQ ID NO: 37 - protein, 246 aa, Artificial Sequence
  E200+CD19 binder CD19, FMC63, B005_Heavy Chain
EVKLQESGPGLVAPSQSLSVTCTVSGVSLPDYGVSWIRQPPRKGLEWLGVIWGSETTYYNSALKSRLTIIKDNSKSQVFLKMNSLQTDDTAIYYCAKHYYYGGSYAMDYWGQGTSVTVSSASTKGPSVFPLAPSSKSTSGGTAALGCLVKDYFPEPVTVSWNSGALTSGVHTFPAVLQSSGLYSLSSVVTVPSSSLGTQTYICNVNHKPSNTKVDKKVEPKSCGHNYTTRNILPGLNITSHHHHHH

SEQ ID NO: 38 - protein, 222 aa, Artificial Sequence
  CD19, FMC63, B005_Light Chain
DIQMTQTTSSLSASLGDRVTISCRASQDISKYLNWYQQKPDGTVKLLIYHTSRLHSGVPSRFSGSGSGTDYSLTISNLEQEDIATYFCQQGNTLPYTFGGGTKLEITKARTVAAPSVFIFPPSDEQLKSGTASVVCLLNNFYPREAKVQWKVDNALQSGNSQESVTEQDSKDSTYSLSSTLTLSKADYEKHKVYACEVTHQGLSSPVTKSFNRGECHHHHHH

SEQ ID NO: 39 - protein, 233 aa, Artificial Sequence
  E200+CD19 binder  CD19, FMC63, B006_Light Chain
DIQMTQTTSSLSASLGDRVTISCRASQDISKYLNWYQQKPDGTVKLLIYHTSRLHSGVPSRFSGSGSGTDYSLTISNLEQEDIATYFCQQGNTLPYTFGGGTKLEITKARTVAAPSVFIFPPSDEQLKSGTASVVCLLNNFYPREAKVQWKVDNALQSGNSQESVTEQDSKDSTYSLSSTLTLSKADYEKHKVYACEVTHQGLSSPVTKSFNRGECGHNYTTRNILPGLNITS

SEQ ID NO: 40 - protein, 248 aa, Artificial Sequence
  "CD19 binder scFv format B011  CD19, FMC63, B011_scFv_Light/Heavy "
DIQMTQTTSSLSASLGDRVTISCRASQDISKYLNWYQQKPDGTVKLLIYHTSRLHSGVPSRFSGSGSGTDYSLTISNLEQEDIATYFCQQGNTLPYTFGGGTKLEITGGGGSGGGGSGGGGSEVKLQESGPGLVAPSQSLSVTCTVSGVSLPDYGVSWIRQPPRKGLEWLGVIWGSETTYYNSALKSRLTIIKDNSKSQVFLKMNSLQTDDTAIYYCAKHYYYGGSYAMDYWGQGTSVTVSSHHHHHH

SEQ ID NO: 41 - protein, 248 aa, Artificial Sequence
  CD19 binder scFv format CD19, FMC63, B012_scFv_Heavy/Light
EVKLQESGPGLVAPSQSLSVTCTVSGVSLPDYGVSWIRQPPRKGLEWLGVIWGSETTYYNSALKSRLTIIKDNSKSQVFLKMNSLQTDDTAIYYCAKHYYYGGSYAMDYWGQGTSVTVSSGGGGSGGGGSGGGGSDIQMTQTTSSLSASLGDRVTISCRASQDISKYLNWYQQKPDGTVKLLIYHTSRLHSGVPSRFSGSGSGTDYSLTISNLEQEDIATYFCQQGNTLPYTFGGGTKLEITHHHHHH

SEQ ID NO: 42 - protein, 265 aa, Artificial Sequence
  E200+CD19 binder in scFv format  CD19, FMC63, B013-1_scFv_LH
GHNYTTRNILPGLNITSDIQMTQTTSSLSASLGDRVTISCRASQDISKYLNWYQQKPDGTVKLLIYHTSRLHSGVPSRFSGSGSGTDYSLTISNLEQEDIATYFCQQGNTLPYTFGGGTKLEITGGGGSGGGGSGGGGSEVKLQESGPGLVAPSQSLSVTCTVSGVSLPDYGVSWIRQPPRKGLEWLGVIWGSETTYYNSALKSRLTIIKDNSKSQVFLKMNSLQTDDTAIYYCAKHYYYGGSYAMDYWGQGTSVTVSSHHHHHH

SEQ ID NO: 43 - protein, 270 aa, Artificial Sequence
  E200+CD19 binder in scFv format CD19, FMC63, B013-2_scFv_LH
GHNYTTRNILPGLNITSGGGGSDIQMTQTTSSLSASLGDRVTISCRASQDISKYLNWYQQKPDGTVKLLIYHTSRLHSGVPSRFSGSGSGTDYSLTISNLEQEDIATYFCQQGNTLPYTFGGGTKLEITGGGGSGGGGSGGGGSEVKLQESGPGLVAPSQSLSVTCTVSGVSLPDYGVSWIRQPPRKGLEWLGVIWGSETTYYNSALKSRLTIIKDNSKSQVFLKMNSLQTDDTAIYYCAKHYYYGGSYAMDYWGQGTSVTVSSHHHHHH

SEQ ID NO: 44 - protein, 265 aa, Artificial Sequence
  E200+CD19 binder in scFv format  CD19, FMC63, B014-1_scFv_HL
GHNYTTRNILPGLNITSEVKLQESGPGLVAPSQSLSVTCTVSGVSLPDYGVSWIRQPPRKGLEWLGVIWGSETTYYNSALKSRLTIIKDNSKSQVFLKMNSLQTDDTAIYYCAKHYYYGGSYAMDYWGQGTSVTVSSGGGGSGGGGSGGGGSDIQMTQTTSSLSASLGDRVTISCRASQDISKYLNWYQQKPDGTVKLLIYHTSRLHSGVPSRFSGSGSGTDYSLTISNLEQEDIATYFCQQGNTLPYTFGGGTKLEITHHHHHH

SEQ ID NO: 45 - protein, 270 aa, Artificial Sequence
  E200+CD19 binder in scFv format CD19, FMC63, B014-2_scFv_HL
GHNYTTRNILPGLNITSGGGGSEVKLQESGPGLVAPSQSLSVTCTVSGVSLPDYGVSWIRQPPRKGLEWLGVIWGSETTYYNSALKSRLTIIKDNSKSQVFLKMNSLQTDDTAIYYCAKHYYYGGSYAMDYWGQGTSVTVSSGGGGSGGGGSGGGGSDIQMTQTTSSLSASLGDRVTISCRASQDISKYLNWYQQKPDGTVKLLIYHTSRLHSGVPSRFSGSGSGTDYSLTISNLEQEDIATYFCQQGNTLPYTFGGGTKLEITHHHHHH

SEQ ID NO: 46 - protein, 265 aa, Artificial Sequence
  E200+CD19 binder in scFv format  CD19, FMC63, B015_scFv_HL
EVKLQESGPGLVAPSQSLSVTCTVSGVSLPDYGVSWIRQPPRKGLEWLGVIWGSETTYYNSALKSRLTIIKDNSKSQVFLKMNSLQTDDTAIYYCAKHYYYGGSYAMDYWGQGTSVTVSSGGGGSGGGGSGGGGSDIQMTQTTSSLSASLGDRVTISCRASQDISKYLNWYQQKPDGTVKLLIYHTSRLHSGVPSRFSGSGSGTDYSLTISNLEQEDIATYFCQQGNTLPYTFGGGTKLEITGHNYTTRNILPGLNITSHHHHHH

SEQ ID NO: 47 - protein, 282 aa, Artificial Sequence
  E200+CD19 binder in scFv format CD19, FMC63, B017-1_scFv_LH
GHNYTTRNILPGLNITSDIQMTQTTSSLSASLGDRVTISCRASQDISKYLNWYQQKPDGTVKLLIYHTSRLHSGVPSRFSGSGSGTDYSLTISNLEQEDIATYFCQQGNTLPYTFGGGTKLEITGGGGSGGGGSGGGGSEVKLQESGPGLVAPSQSLSVTCTVSGVSLPDYGVSWIRQPPRKGLEWLGVIWGSETTYYNSALKSRLTIIKDNSKSQVFLKMNSLQTDDTAIYYCAKHYYYGGSYAMDYWGQGTSVTVSSGHNYTTRNILPGLNITSHHHHHH

SEQ ID NO: 48 - protein, 287 aa, Artificial Sequence
  E200+CD19 binder in scFv format CD19, FMC63, B017-2_scFv_LH
GHNYTTRNILPGLNITSGGGGSDIQMTQTTSSLSASLGDRVTISCRASQDISKYLNWYQQKPDGTVKLLIYHTSRLHSGVPSRFSGSGSGTDYSLTISNLEQEDIATYFCQQGNTLPYTFGGGTKLEITGGGGSGGGGSGGGGSEVKLQESGPGLVAPSQSLSVTCTVSGVSLPDYGVSWIRQPPRKGLEWLGVIWGSETTYYNSALKSRLTIIKDNSKSQVFLKMNSLQTDDTAIYYCAKHYYYGGSYAMDYWGQGTSVTVSSGHNYTTRNILPGLNITSHHHHHH

SEQ ID NO: 49 - protein, 282 aa, Artificial Sequence
  E200+CD19 binder in scFv format CD19, FMC63, B018-1_scFv_HL
GHNYTTRNILPGLNITSEVKLQESGPGLVAPSQSLSVTCTVSGVSLPDYGVSWIRQPPRKGLEWLGVIWGSETTYYNSALKSRLTIIKDNSKSQVFLKMNSLQTDDTAIYYCAKHYYYGGSYAMDYWGQGTSVTVSSGGGGSGGGGSGGGGSDIQMTQTTSSLSASLGDRVTISCRASQDISKYLNWYQQKPDGTVKLLIYHTSRLHSGVPSRFSGSGSGTDYSLTISNLEQEDIATYFCQQGNTLPYTFGGGTKLEITGHNYTTRNILPGLNITSHHHHHH

SEQ ID NO: 50 - protein, 287 aa, Artificial Sequence
  E200+CD19 binder in scFv format CD19, FMC63, B018-2_scFv_HL
GHNYTTRNILPGLNITSGGGGSEVKLQESGPGLVAPSQSLSVTCTVSGVSLPDYGVSWIRQPPRKGLEWLGVIWGSETTYYNSALKSRLTIIKDNSKSQVFLKMNSLQTDDTAIYYCAKHYYYGGSYAMDYWGQGTSVTVSSGGGGSGGGGSGGGGSDIQMTQTTSSLSASLGDRVTISCRASQDISKYLNWYQQKPDGTVKLLIYHTSRLHSGVPSRFSGSGSGTDYSLTISNLEQEDIATYFCQQGNTLPYTFGGGTKLEITGHNYTTRNILPGLNITSHHHHHH

SEQ ID NO: 51 - protein, 242 aa, Artificial Sequence
  E200+CD19 binder CD19, Tafasitamab, B020-1_Light Chain
GHNYTTRNILPGLNITSDIVMTQSPATLSLSPGERATLSCRSSKSLQNVNGNTYLYWFQQKPGQSPQLLIYRMSNLNSGVPDRFSGSGSGTEFTLTISSLEPEDFAVYYCMQHLEYPITFGAGTKLEIKRTVAAPSVFIFPPSDEQLKSGTASVVCLLNNFYPREAKVQWKVDNALQSGNSQESVTEQDSKDSTYSLSSTLTLSKADYEKHKVYACEVTHQGLSSPVTKSFNRGECHHHHHH

SEQ ID NO: 52 - protein, 230 aa, Artificial Sequence
  CD19, Tafasitamab, B020-2_Heavy Chain
EVQLVESGGGLVKPGGSLKLSCAASGYTFTSYVMHWVRQAPGKGLEWIGYINPYNDGTKYNEKFQGRVTISSDKSISTAYMELSSLRSEDTAMYYCARGTYYYGTRVFDYWGQGTLVTVSSASTKGPSVFPLAPSSKSTSGGTAALGCLVKDYFPEPVTVSWNSGALTSGVHTFPAVLQSSGLYSLSSVVTVPSSSLGTQTYICNVNHKPSNTKVDKKVEPKSCHHHHHH

SEQ ID NO: 53 - protein, 236 aa, Artificial Sequence
  E200+CD20 binder CD20, Ocrelizumab, B021-1_Light chain
GHNYTTRNILPGLNITSDIQMTQSPSSLSASVGDRVTITCRASSSVSYMHWYQQKPGKAPKPLIYAPSNLASGVPSRFSGSGSGTDFTLTISSLQPEDFATYYCQQWSFNPPTFGQGTKVEIKRTVAAPSVFIFPPSDEQLKSGTASVVCLLNNFYPREAKVQWKVDNALQSGNSQESVTEQDSKDSTYSLSSTLTLSKADYEKHKVYACEVTHQGLSSPVTKSFNRGECHHHHHH

SEQ ID NO: 54 - protein, 231 aa, Artificial Sequence
  CD20, Ocrelizumab, B021-1_Heavy Chain
EVQLVESGGGLVQPGGSLRLSCAASGYTFTSYNMHWVRQAPGKGLEWVGAIYPGNGDTSYNQKFKGRFTISVDKSKNTLYLQMNSLRAEDTAVYYCARVVYYSNSYWYFDVWGQGTLVTVSSASTKGPSVFPLAPSSKSTSGGTAALGCLVKDYFPEPVTVSWNSGALTSGVHTFPAVLQSSGLYSLSSVVTVPSSSLGTQTYICNVNHKPSNTKVDKKVEPKSCHHHHHH

SEQ ID NO: 55 - protein, 237 aa, Artificial Sequence
  E200+CD20 binder CD20, Ofatumumab, B022-1_Light Chain
GHNYTTRNILPGLNITSEIVLTQSPATLSLSPGERATLSCRASQSVSSYLAWYQQKPGQAPRLLIYDASNRATGIPARFSGSGSGTDFTLTISSLEPEDFAVYYCQQRSNWPITFGQGTRLEIKRTVAAPSVFIFPPSDEQLKSGTASVVCLLNNFYPREAKVQWKVDNALQSGNSQESVTEQDSKDSTYSLSSTLTLSKADYEKHKVYACEVTHQGLSSPVTKSFNRGECHHHHHH

SEQ ID NO: 56 - protein, 231 aa, Artificial Sequence
  CD20, Ofatumumab, B022-2_Heavy Chain
EVQLVESGGGLVQPGRSLRLSCAASGFTFNDYAMHWVRQAPGKGLEWVSTISWNSGSIGYADSVKGRFTISRDNAKKSLYLQMNSLRAEDTALYYCAKDIQYGNYYYGMDVWGQGTTVTVSSASTKGPSVFPLAPSSKSTSGGTAALGCLVKDYFPEPVTVSWNSGALTSGVHTFPAVLQSSGLYSLSSVVTVPSSSLGTQTYICNVNHKPSNTKVDKKVEPKSCHHHHHH

SEQ ID NO: 57 - protein, 237 aa, Artificial Sequence
  E200+CD22 binder CD22, m971-L7, B023-1_LC
GHNYTTRNILPGLNITSDIQMIQSPSSLSASVGDRVTITCRASQTIWSYLNWYRQRPGEAPNLLIYAASSLQSGVPSRFSGRGSGTDFTLTISSLQAEDFATYYCQQSYSIPQTFGQGTKLEIKRTVAAPSVFIFPPSDEQLKSGTASVVCLLNNFYPREAKVQWKVDNALQSGNSQESVTEQDSKDSTYSLSSTLTLSKADYEKHKVYACEVTHQGLSSPVTKSFNRGECHHHHHH

SEQ ID NO: 58 - protein, 233 aa, Artificial Sequence
  CD22, m971-L7, B023-2_Heavy Chain
QVQLQQSGPGMVKPSQTLSLTCAISGDSVSSNSVAWNWIRQSPSRGLEWLGRTYYRSTWYNDYAVSMKSRITINPDTNKNQFSLQLNSVTPEDTAVYYCAREVTGDLEDAFDIWGQGTMVTVSSASTKGPSVFPLAPSSKSTSGGTAALGCLVKDYFPEPVTVSWNSGALTSGVHTFPAVLQSSGLYSLSSVVTVPSSSLGTQTYICNVNHKPSNTKVDKKVEPKSCHHHHHH

SEQ ID NO: 59 - protein, 242 aa, Artificial Sequence
  E200+CD22 binder CD22, Inotuzumab, B024-1_LC
GHNYTTRNILPGLNITSDVQVTQSPSSLSASVGDRVTITCRSSQSLANSYGNTFLSWYLHKPGKAPQLLIYGISNRFSGVPDRFSGSGSGTDFTLTISSLQPEDFATYYCLQGTHQPYTFGQGTKVEIKRTVAAPSVFIFPPSDEQLKSGTASVVCLLNNFYPREAKVQWKVDNALQSGNSQESVTEQDSKDSTYSLSSTLTLSKADYEKHKVYACEVTHQGLSSPVTKSFNRGECHHHHHH

SEQ ID NO: 60 - protein, 230 aa, Artificial Sequence
  CD22, Inotuzumab, B024-2_HC
EVQLVQSGAEVKKPGASVKVSCKASGYRFTNYWIHWVRQAPGQGLEWIGGINPGNNYATYRRKFQGRVTMTADTSTSTVYMELSSLRSEDTAVYYCTREGYGNYGAWFAYWGQGTLVTVSSASTKGPSVFPLAPSSKSTSGGTAALGCLVKDYFPEPVTVSWNSGALTSGVHTFPAVLQSSGLYSLSSVVTVPSSSLGTQTYICNVNHKPSNTKVDKKVEPKSCHHHHHH

SEQ ID NO: 61 - protein, 241 aa, Artificial Sequence
  E200+CD79B binder CD79B, Polatuzumab, B025-1_LC
GHNYTTRNILPGLNITSDIQLTQSPSSLSASVGDRVTITCKASQSVDYEGDSFLNWYQQKPGKAPKLLIYAASNLESGVPSRFSGSGSGTDFTLTISSLQPEDFATYYCQQSNEDPLTFGQGTKVEIKRTVAAPSVFIFPPSDEQLKSGTASVVCLLNNFYPREAKVQWKVDNALQSGNSQESVTEQDSKDSTYSLSSTLTLSKADYEKHKVYACEVTHQGLSSPVTKSFNRGECHHHHHH

SEQ ID NO: 62 - protein, 226 aa, Artificial Sequence
  CD79B, Polatuzumab, B025-2_HC
EVQLVESGGGLVQPGGSLRLSCAASGYTFSSYWIEWVRQAPGKGLEWIGEILPGGGDTNYNEIFKGRATFSADTSKNTAYLQMNSLRAEDTAVYYCTRRVPIRLDYWGQGTLVTVSSASTKGPSVFPLAPSSKSTSGGTAALGCLVKDYFPEPVTVSWNSGALTSGVHTFPAVLQSSGLYSLSSVVTVPSSSLGTQTYICNVNHKPSNTKVDKKVEPKSCHHHHHH

SEQ ID NO: 63 - protein, 237 aa, Artificial Sequence
  E200+CD37 binder CD37, Otlertuzumab, B026-1_LC
GHNYTTRNILPGLNITSEIVLTQSPATLSLSPGERATLSCRASENVYSYLAWYQQKPGQAPRLLIYFAKTLAEGIPARFSGSGSGTDFTLTISSLEPEDFAVYYCQHHSDNPWTFGQGTKVEIKRTVAAPSVFIFPPSDEQLKSGTASVVCLLNNFYPREAKVQWKVDNALQSGNSQESVTEQDSKDSTYSLSSTLTLSKADYEKHKVYACEVTHQGLSSPVTKSFNRGECHHHHHH

SEQ ID NO: 64 - protein, 225 aa, Artificial Sequence
  CD37, Otlertuzumab, B026-2_HC
EVQLVQSGAEVKKPGESLKISCKGSGYSFTGYNMNWVRQMPGKGLEWMGNIDPYYGGTTYNRKFKGQVTISADKSISTAYLQWSSLKASDTAMYYCARSVGPFDSWGQGTLVTVSSASTKGPSVFPLAPSSKSTSGGTAALGCLVKDYFPEPVTVSWNSGALTSGVHTFPAVLQSSGLYSLSSVVTVPSSSLGTQTYICNVNHKPSNTKVDKKVEPKSCHHHHHH

SEQ ID NO: 65 - protein, 237 aa, Artificial Sequence
  E200+CD38 binder CD38, Daratumumab, B027-1_LC
GHNYTTRNILPGLNITSEIVLTQSPATLSLSPGERATLSCRASQSVSSYLAWYQQKPGQAPRLLIYDASNRATGIPARFSGSGSGTDFTLTISSLEPEDFAVYYCQQRSNWPPTFGQGTKVEIKRTVAAPSVFIFPPSDEQLKSGTASVVCLLNNFYPREAKVQWKVDNALQSGNSQESVTEQDSKDSTYSLSSTLTLSKADYEKHKVYACEVTHQGLSSPVTKSFNRGECHHHHHH

SEQ ID NO: 66 - protein, 231 aa, Artificial Sequence
  CD38, Daratumumab, B027-2_HC
EVQLLESGGGLVQPGGSLRLSCAVSGFTFNSFAMSWVRQAPGKGLEWVSAISGSGGGTYYADSVKGRFTISRDNSKNTLYLQMNSLRAEDTAVYFCAKDKILWFGEPVFDYWGQGTLVTVSSASTKGPSVFPLAPSSKSTSGGTAALGCLVKDYFPEPVTVSWNSGALTSGVHTFPAVLQSSGLYSLSSVVTVPSSSLGTQTYICNVNHKPSNTKVDKKVEPKSCHHHHHH

SEQ ID NO: 67 - protein, 241 aa, Artificial Sequence
  E200+CD70 binder CD70, Cusatuzumab, B028-1_LC
GHNYTTRNILPGLNITSQAVVTQEPSLTVSPGGTVTLTCGLKSGSVTSDNFPTWYQQTPGQAPRLLIYNTNTRHSGVPDRFSGSILGNKAALTITGAQADDEAEYFCALFISNPSVEFGGGTQLTVLKRTVAAPSVFIFPPSDEQLKSGTASVVCLLNNFYPREAKVQWKVDNALQSGNSQESVTEQDSKDSTYSLSSTLTLSKADYEKHKVYACEVTHQGLSSPVTKSFNRGECHHHHHH

SEQ ID NO: 68 - protein, 231 aa, Artificial Sequence
  CD70, Cusatuzumab, B028-2_HC
EVQLVESGGGLVQPGGSLRLSCAASGFTFSVYYMNWVRQAPGKGLEWVSDINNEGGTTYYADSVKGRFTISRDNSKNSLYLQMNSLRAEDTAVYYCARDAGYSNHVPIFDSWGQGTLVTVSSASTKGPSVFPLAPSSKSTSGGTAALGCLVKDYFPEPVTVSWNSGALTSGVHTFPAVLQSSGLYSLSSVVTVPSSSLGTQTYICNVNHKPSNTKVDKKVEPKSCHHHHHH

SEQ ID NO: 69 - protein, 241 aa, Artificial Sequence
  E200+CD30 binder CD30, Brentuximab, B029-1_LC
GHNYTTRNILPGLNITSDIVLTQSPASLAVSLGQRATISCKASQSVDFDGDSYMNWYQQKPGQPPKVLIYAASNLESGIPARFSGSGSGTDFTLNIHPVEEEDAATYYCQQSNEDPWTFGGGTKLEIKRTVAAPSVFIFPPSDEQLKSGTASVVCLLNNFYPREAKVQWKVDNALQSGNSQESVTEQDSKDSTYSLSSTLTLSKADYEKHKVYACEVTHQGLSSPVTKSFNRGECHHHHHH

SEQ ID NO: 70 - protein, 226 aa, Artificial Sequence
  CD30, Brentuximab, B029-2_HC
QIQLQQSGPEVVKPGASVKISCKASGYTFTDYYITWVKQKPGQGLEWIGWIYPGSGNTKYNEKFKGKATLTVDTSSSTAFMQLSSLTSEDTAVYFCANYGNYWFAYWGQGTQVTVSAASTKGPSVFPLAPSSKSTSGGTAALGCLVKDYFPEPVTVSWNSGALTSGVHTFPAVLQSSGLYSLSSVVTVPSSSLGTQTYICNVNHKPSNTKVDKKVEPKSCHHHHHH

SEQ ID NO: 71 - protein, 241 aa, Artificial Sequence
  E200+CD33 binder CD33, Gemtuzumab, B030-1_LC
GHNYTTRNILPGLNITSDIQLTQSPSTLSASVGDRVTITCRASESLDNYGIRFLTWFQQKPGKAPKLLMYAASNQGSGVPSRFSGSGSGTEFTLTISSLQPDDFATYYCQQTKEVPWSFGQGTKVEVKRTVAAPSVFIFPPSDEQLKSGTASVVCLLNNFYPREAKVQWKVDNALQSGNSQESVTEQDSKDSTYSLSSTLTLSKADYEKHKVYACEVTHQGLSSPVTKSFNRGECHHHHHH

SEQ ID NO: 72 - protein, 225 aa, Artificial Sequence
  CD33, Gemtuzumab, B030-2_Heavy Chain
EVQLVQSGAEVKKPGSSVKVSCKASGYTITDSNIHWVRQAPGQSLEWIGYIYPYNGGTDYNQKFKNRATLTVDNPTNTAYMELSSLRSEDTAFYYCVNGNPWLAYWGQGTLVTVSSASTKGPSVFPLAPSSKSTSGGTAALGCLVKDYFPEPVTVSWNSGALTSGVHTFPAVLQSSGLYSLSSVVTVPSSSLGTQTYICNVNHKPSNTKVDKKVEPKSCHHHHHH

SEQ ID NO: 73 - protein, 241 aa, Artificial Sequence
  E200+CD33 binder CD33, Lintuzumab, B031-1_LC
GHNYTTRNILPGLNITSDIQMTQSPSSLSASVGDRVTITCRASESVDNYGISFMNWFQQKPGKAPKLLIYAASNQGSGVPSRFSGSGSGTDFTLTISSLQPDDFATYYCQQSKEVPWTFGQGTKVEIKRTVAAPSVFIFPPSDEQLKSGTASVVCLLNNFYPREAKVQWKVDNALQSGNSQESVTEQDSKDSTYSLSSTLTLSKADYEKHKVYACEVTHQGLSSPVTKSFNRGECHHHHHH

SEQ ID NO: 74 - protein, 225 aa, Artificial Sequence
  CD33, Lintuzumab, B031-2_HC
QVQLVQSGAEVKKPGSSVKVSCKASGYTFTDYNMHWVRQAPGQGLEWIGYIYPYNGGTGYNQKFKSKATITADESTNTAYMELSSLRSEDTAVYYCARGRPAMDYWGQGTLVTVSSASTKGPSVFPLAPSSKSTSGGTAALGCLVKDYFPEPVTVSWNSGALTSGVHTFPAVLQSSGLYSLSSVVTVPSSSLGTQTYICNVNHKPSNTKVDKKVEPKSCHHHHHH

SEQ ID NO: 75 - protein, 237 aa, Artificial Sequence
  E200+Her2 binder Her2, Pertuzumab, B032-1_LC
GHNYTTRNILPGLNITSDIQMTQSPSSLSASVGDRVTITCKASQDVSIGVAWYQQKPGKAPKLLIYSASYRYTGVPSRFSGSGSGTDFTLTISSLQPEDFATYYCQQYYIYPYTFGQGTKVEIKRTVAAPSVFIFPPSDEQLKSGTASVVCLLNNFYPREAKVQWKVDNALQSGNSQESVTEQDSKDSTYSLSSTLTLSKADYEKHKVYACEVTHQGLSSPVTKSFNRGECHHHHHH

SEQ ID NO: 76 - protein, 228 aa, Artificial Sequence
  Her2, Pertuzumab, B032-2_HC
EVQLVESGGGLVQPGGSLRLSCAASGFTFTDYTMDWVRQAPGKGLEWVADVNPNSGGSIYNQRFKGRFTLSVDRSKNTLYLQMNSLRAEDTAVYYCARNLGPSFYFDYWGQGTLVTVSSASTKGPSVFPLAPSSKSTSGGTAALGCLVKDYFPEPVTVSWNSGALTSGVHTFPAVLQSSGLYSLSSVVTVPSSSLGTQTYICNVNHKPSNTKVDKKVEPKSCHHHHHH

SEQ ID NO: 77 - protein, 237 aa, Artificial Sequence
  E200+Her2 binder Her2, Trastuzumab, B033-1_LC
GHNYTTRNILPGLNITSDIQMTQSPSSLSASVGDRVTITCRASQDVNTAVAWYQQKPGKAPKLLIYSASFLYSGVPSRFSGSRSGTDFTLTISSLQPEDFATYYCQQHYTTPPTFGQGTKVEIKRTVAAPSVFIFPPSDEQLKSGTASVVCLLNNFYPREAKVQWKVDNALQSGNSQESVTEQDSKDSTYSLSSTLTLSKADYEKHKVYACEVTHQGLSSPVTKSFNRGECHHHHHH

SEQ ID NO: 78 - protein, 229 aa, Artificial Sequence
  Her2, Trastuzumab, B033-2_HC
EVQLVESGGGLVQPGGSLRLSCAASGFNIKDTYIHWVRQAPGKGLEWVARIYPTNGYTRYADSVKGRFTISADTSKNTAYLQMNSLRAEDTAVYYCSRWGGDGFYAMDYWGQGTLVTVSSASTKGPSVFPLAPSSKSTSGGTAALGCLVKDYFPEPVTVSWNSGALTSGVHTFPAVLQSSGLYSLSSVVTVPSSSLGTQTYICNVNHKPSNTKVDKKVEPKSCHHHHHH

SEQ ID NO: 79 - protein, 237 aa, Artificial Sequence
  E200+EGFR binder EGFR, Necitumumab, B034-1_LC
GHNYTTRNILPGLNITSEIVMTQSPATLSLSPGERATLSCRASQSVSSYLAWYQQKPGQAPRLLIYDASNRATGIPARFSGSGSGTDFTLTISSLEPEDFAVYYCHQYGSTPLTFGGGTKAEIKRTVAAPSVFIFPPSDEQLKSGTASVVCLLNNFYPREAKVQWKVDNALQSGNSQESVTEQDSKDSTYSLSSTLTLSKADYEKHKVYACEVTHQGLSSPVTKSFNRGECHHHHHH

SEQ ID NO: 80 - protein, 230 aa, Artificial Sequence
  EGFR, Necitumumab, B034-2_HC
QVQLQESGPGLVKPSQTLSLTCTVSGGSISSGDYYWSWIRQPPGKGLEWIGYIYYSGSTDYNPSLKSRVTMSVDTSKNQFSLKVNSVTAADTAVYYCARVSIFGVGTFDYWGQGTLVTVSSASTKGPSVFPLAPSSKSTSGGTAALGCLVKDYFPEPVTVSWNSGALTSGVHTFPAVLQSSGLYSLSSVVTVPSSSLGTQTYICNVNHKPSNTKVDKKVEPKSCHHHHHH

SEQ ID NO: 81 - protein, 236 aa, Artificial Sequence
  E200+EGFR binder EGFR, Matuzumab, B035-1_LC
GHNYTTRNILPGLNITSDIQMTQSPSSLSASVGDRVTITCSASSSVTYMYWYQQKPGKAPKLLIYDTSNLASGVPSRFSGSGSGTDYTFTISSLQPEDIATYYCQQWSSHIFTFGQGTKVEIKRTVAAPSVFIFPPSDEQLKSGTASVVCLLNNFYPREAKVQWKVDNALQSGNSQESVTEQDSKDSTYSLSSTLTLSKADYEKHKVYACEVTHQGLSSPVTKSFNRGECHHHHHH

SEQ ID NO: 82 - protein, 230 aa, Artificial Sequence
  EGFR, Matuzumab, B035-2_HC
QVQLVQSGAEVKKPGASVKVSCKASGYTFTSHWMHWVRQAPGQGLEWIGEFNPSNGRTNYNEKFKSKATMTVDTSTNTAYMELSSLRSEDTAVYYCASRDYDYDGRYFDYWGQGTLVTVSSASTKGPSVFPLAPSSKSTSGGTAALGCLVKDYFPEPVTVSWNSGALTSGVHTFPAVLQSSGLYSLSSVVTVPSSSLGTQTYICNVNHKPSNTKVDKKVEPKSCHHHHHH

SEQ ID NO: 83 - protein, 237 aa, Artificial Sequence
  E200+EGFR binder EGFR, Panitumumab, B036-1_LC
GHNYTTRNILPGLNITSDIQMTQSPSSLSASVGDRVTITCQASQDISNYLNWYQQKPGKAPKLLIYDASNLETGVPSRFSGSGSGTDFTFTISSLQPEDIATYFCQHFDHLPLAFGGGTKVEIKRTVAAPSVFIFPPSDEQLKSGTASVVCLLNNFYPREAKVQWKVDNALQSGNSQESVTEQDSKDSTYSLSSTLTLSKADYEKHKVYACEVTHQGLSSPVTKSFNRGECHHHHHH

SEQ ID NO: 84 - protein, 228 aa, Artificial Sequence
  EGFR, Panitumumab, B036-2_HC
QVQLQESGPGLVKPSETLSLTCTVSGGSVSSGDYYWTWIRQSPGKGLEWIGHIYYSGNTNYNPSLKSRLTISIDTSKTQFSLKLSSVTAADTAIYYCVRDRVTGAFDIWGQGTMVTVSSASTKGPSVFPLAPSSKSTSGGTAALGCLVKDYFPEPVTVSWNSGALTSGVHTFPAVLQSSGLYSLSSVVTVPSSSLGTQTYICNVNHKPSNTKVDKKVEPKSCHHHHHH

SEQ ID NO: 85 - protein, 237 aa, Artificial Sequence
  E200+CD276 binder CD276, hu8H9-6m, B037-1_LC
GHNYTTRNILPGLNITSEIVMTQSPATLSVSPGERVTLSCRASQSISDYLYWYQQKSHESPRLLIKYASQSISGIPARFSGSGSGSEFTLTINSVEPEDVGVYYCQNGHSFPLTFGQGTKLELKRTVAAPSVFIFPPSDEQLKSGTASVVCLLNNFYPREAKVQWKVDNALQSGNSQESVTEQDSKDSTYSLSSTLTLSKADYEKHKVYACEVTHQGLSSPVTKSFNRGECHHHHHH

SEQ ID NO: 86 - protein, 227 aa, Artificial Sequence
  CD276, hu8H9-6m, B037-2_HC
QVQLVQSGAEVVKPGASVKLSCKTSGYTFTNYDINWVRQRPGQGLEWIGWIFPGDDSTQYNEKFKGKATLTTDTSTSTAYMELSSLRSEDTAVYFCARQTTGTWFAYWGQGTLVTVSSASTKGPSVFPLAPSSKSTSGGTAALGCLVKDYFPEPVTVSWNSGALTSGVHTFPAVLQSSGLYSLSSVVTVPSSSLGTQTYICNVNHKPSNTKVDKKVEPKSCHHHHHH

SEQ ID NO: 87 - protein, 234 aa, Artificial Sequence
  E200+GD2 binder GD2, Naxitamab, B038-1_LC
GHNYTTRNILPGLNITSKIVMTQTPATLSVSAGERVTITCKASQSVSNHVTWYQQKPGQAPRLLIYSASNRYSGVPARFSGSGYGTEFTFTISSVQSEDFAVYFCQQDYSSFGQGTKLEIKRTVAAPSVFIFPPSDEQLKSGTASVVCLLNNFYPREAKVQWKVDNALQSGNSQESVTEQDSKDSTYSLSSTLTLSKADYEKHKVYACEVTHQGLSSPVTKSFNRGECHHHHHH

SEQ ID NO: 88 - protein, 228 aa, Artificial Sequence
  GD2, Naxitamab, B038-2_HC
QVQLVESGPGVVQPGRSLRLSCAVSGFSVTNYGVHWVRQPPGKGLEWLGVIWAGGITNYNSSVKGRLTISKDNSKNTVYLQMNSLRAEDTAVYYCASRGGHYGYALDYWGQGTLVTVSSASTKGPSVFPLAPSSKSTSGGTAALGCLVKDYFPEPVTVSWNSGALTSGVHTFPAVLQSSGLYSLSSVVTVPSSSLGTQTYICNVNHKPSNTKVDKKVEPKSCHHHHHH

SEQ ID NO: 89 - protein, 237 aa, Artificial Sequence
  E200+BCMA binder BCMA, clone CA8 J9M0, B039-1_LC
GHNYTTRNILPGLNITSDIQMTQSPSSLSASVGDRVTITCSASQDISNYLNWYQQKPGKAPKLLIYYTSNLHSGVPSRFSGSGSGTDFTLTISSLQPEDFATYYCQQYRKLPWTFGQGTKLEIKRTVAAPSVFIFPPSDEQLKSGTASVVCLLNNFYPREAKVQWKVDNALQSGNSQESVTEQDSKDSTYSLSSTLTLSKADYEKHKVYACEVTHQGLSSPVTKSFNRGECHHHHHH

SEQ ID NO: 90 - protein, 230 aa, Artificial Sequence
  BCMA, clone CA8 J9M0, B039-2_HC
QVQLVQSGAEVKKPGSSVKVSCKGSGYTFTNYWMHWVRQAPGQGLEWIGATYRGHSDTYYNQKFKGRATLTADTSTSTAYMELSSLRSEDTAVYYCTRGAIYDGYDVLDNWGQGTLVTVSSASTKGPSVFPLAPSSKSTSGGTAALGCLVKDYFPEPVTVSWNSGALTSGVHTFPAVLQSSGLYSLSSVVTVPSSSLGTQTYICNVNHKPSNTKVDKKVEPKSCHHHHHH

SEQ ID NO: 91 - protein, 237 aa, Artificial Sequence
  E200+CD371 binder US10568947_CAR9, B040-1_LC
GHNYTTRNILPGLNITSDIVMTQSPSSVSASVGDRVTITCRASQDISSWLAWYQQKPGKAPKLLIYAASSLQSGVPSRFNGSGSGTDFTLTISSLQPEDFATYYCQQSYSTPLTFGGGTKVEIKRTVAAPSVFIFPPSDEQLKSGTASVVCLLNNFYPREAKVQWKVDNALQSGNSQESVTEQDSKDSTYSLSSTLTLSKADYEKHKVYACEVTHQGLSSPVTKSFNRGECHHHHHH

SEQ ID NO: 92 - protein, 228 aa, Artificial Sequence
  CD371, US10568947_CAR9, B040-2_HC
QVQLVQSGAEVKEPGASVKVSCKAPANTFSDHVMHWVRQAPGQRFEWMGYIHAANGGTHYSQKFQDRVTITRDTSANTVYMDLSSLRSEDTAVYYCARGGYNSDAFDIWGQGTMVTVSSASTKGPSVFPLAPSSKSTSGGTAALGCLVKDYFPEPVTVSWNSGALTSGVHTFPAVLQSSGLYSLSSVVTVPSSSLGTQTYICNVNHKPSNTKVDKKVEPKSCHHHHHH

SEQ ID NO: 93 - protein, 237 aa, Artificial Sequence
  E200+CD135 binder CD135, clone 4G8, B041-1_LC
GHNYTTRNILPGLNITSDIVLTQSPATLSVTPGDSVSLSCRASQSISNNLHWYQQKSHESPRLLIKYASQSISGIPSRFSGSGSGTDFTLSINSVETEDFGVYFCQQSNTWPYTFGGGTKLEIKRTVAAPSVFIFPPSDEQLKSGTASVVCLLNNFYPREAKVQWKVDNALQSGNSQESVTEQDSKDSTYSLSSTLTLSKADYEKHKVYACEVTHQGLSSPVTKSFNRGECHHHHHH

SEQ ID NO: 94 - protein, 227 aa, Artificial Sequence
  CD135, clone 4G8, B041-2_HC
QVQLQQPGAELVKPGASLKLSCKSSGYTFTSYWMHWVRQRPGHGLEWIGEIDPSDSYKDYNQKFKDKATLTVDRSSNTAYMHLSSLTSDDSAVYYCARAITTTPFDFWGQGTTLTVSSASTKGPSVFPLAPSSKSTSGGTAALGCLVKDYFPEPVTVSWNSGALTSGVHTFPAVLQSSGLYSLSSVVTVPSSSLGTQTYICNVNHKPSNTKVDKKVEPKSCHHHHHH

SEQ ID NO: 95 - protein, 241 aa, Artificial Sequence
  E200+CD123 binder CD123, clone 32716, B042-1_LC
GHNYTTRNILPGLNITSDIVLTQSPASLAVSLGQRATISCRASESVDNYGNTFMHWYQQKPGQPPKLLIYRASNLESGIPARFSGSGSRTDFTLTINPVEADDVATYYCQQSNEDPPTFGAGTKLELKRTVAAPSVFIFPPSDEQLKSGTASVVCLLNNFYPREAKVQWKVDNALQSGNSQESVTEQDSKDSTYSLSSTLTLSKADYEKHKVYACEVTHQGLSSPVTKSFNRGECHHHHHH

SEQ ID NO: 96 - protein, 227 aa, Artificial Sequence
  CD123, clone 32716, B042-2_HC
QIQLVQSGPELKKPGETVKISCKASGYIFTNYGMNWVKQAPGKSFKWMGWINTYTGESTYSADFKGRFAFSLETSASTAYLHINDLKNEDTATYFCARSGGYDPMDYWGQGTSVTVSSASTKGPSVFPLAPSSKSTSGGTAALGCLVKDYFPEPVTVSWNSGALTSGVHTFPAVLQSSGLYSLSSVVTVPSSSLGTQTYICNVNHKPSNTKVDKKVEPKSCHHHHHH

SEQ ID NO: 97 - protein, 236 aa, Artificial Sequence
  E200+CD105 binder CD105, Carotuximab, B043-1_LC
GHNYTTRNILPGLNITSQIVLSQSPAILSASPGEKVTMTCRASSSVSYMHWYQQKPGSSPKPWIYATSNLASGVPVRFSGSGSGTSYSLTISRVEAEDAATYYCQQWSSNPLTFGAGTKLELKRTVAAPSVFIFPPSDEQLKSGTASVVCLLNNFYPREAKVQWKVDNALQSGNSQESVTEQDSKDSTYSLSSTLTLSKADYEKHKVYACEVTHQGLSSPVTKSFNRGECHHHHHH

SEQ ID NO: 98 - protein, 227 aa, Artificial Sequence
  CD105, Carotuximab, B043-2_HC
EVKLEESGGGLVQPGGSMKLSCAASGFTFSDAWMDWVRQSPEKGLEWVAEIRSKASNHATYYAESVKGRFTISRDDSKSSVYLQMNSLRAEDTGIYYCTRWRRFFDSWGQGTTLTVSSASTKGPSVFPLAPSSKSTSGGTAALGCLVKDYFPEPVTVSWNSGALTSGVHTFPAVLQSSGLYSLSSVVTVPSSSLGTQTYICNVNHKPSNTKVDKKVEPKSCHHHHHH

SEQ ID NO: 99 - protein, 236 aa, Artificial Sequence
  E200+ROR-1 binder ROR-1, clone D10v3, B044-1_LC
GHNYTTRNILPGLNITSEIVLSQSPAITAASLGQKVTITCSASSNVSYIHWYQQRSGTSPRPWIYEISKLASGVPVRFSGSGSGTSYSLTISSMEAEDAAIYYCQQWNYPLITFGSGTKLEIQRTVAAPSVFIFPPSDEQLKSGTASVVCLLNNFYPREAKVQWKVDNALQSGNSQESVTEQDSKDSTYSLSSTLTLSKADYEKHKVYACEVTHQGLSSPVTKSFNRGECHHHHHH

SEQ ID NO: 100 - protein, 226 aa, Artificial Sequence
  ROR-1, clone D10v3, B044-2_HC
QVQLKESGPGLVAPSQTLSITCTVSGFSLTSYGVHWVRQPPGKGLEWLGVIWAGGFTNYNSALKSRLSISKDNSKSQVLLKMTSLQTDDTAMYYCARRGSSYSMDYWGQGTSVTVSSASTKGPSVFPLAPSSKSTSGGTAALGCLVKDYFPEPVTVSWNSGALTSGVHTFPAVLQSSGLYSLSSVVTVPSSSLGTQTYICNVNHKPSNTKVDKKVEPKSCHHHHHH

SEQ ID NO: 101 - protein, 237 aa, Artificial Sequence
  E200+PD-L1 binder PD-L1, Atezolizumab, B045-1_LC
GHNYTTRNILPGLNITSDIQMTQSPSSLSASVGDRVTITCRASQDVSTAVAWYQQKPGKAPKLLIYSASFLYSGVPSRFSGSGSGTDFTLTISSLQPEDFATYYCQQYLYHPATFGQGTKVEIKRTVAAPSVFIFPPSDEQLKSGTASVVCLLNNFYPREAKVQWKVDNALQSGNSQESVTEQDSKDSTYSLSSTLTLSKADYEKHKVYACEVTHQGLSSPVTKSFNRGECHHHHHH

SEQ ID NO: 102 - protein, 227 aa, Artificial Sequence
  PD-L1, Atezolizumab, B045-2_HC
EVQLVESGGGLVQPGGSLRLSCAASGFTFSDSWIHWVRQAPGKGLEWVAWISPYGGSTYYADSVKGRFTISADTSKNTAYLQMNSLRAEDTAVYYCARRHWPGGFDYWGQGTLVTVSSASTKGPSVFPLAPSSKSTSGGTAALGCLVKDYFPEPVTVSWNSGALTSGVHTFPAVLQSSGLYSLSSVVTVPSSSLGTQTYICNVNHKPSNTKVDKKVEPKSCHHHHHH

SEQ ID NO: 103 - protein, 243 aa, Artificial Sequence
  E200+MET-R binder  MET-R, Onartuzumab, B046-1_LC
GHNYTTRNILPGLNITSDIQMTQSPSSLSASVGDRVTITCKSSQSLLYTSSQKNYLAWYQQKPGKAPKLLIYWASTRESGVPSRFSGSGSGTDFTLTISSLQPEDFATYYCQQYYAYPWTFGQGTKVEIKRTVAAPSVFIFPPSDEQLKSGTASVVCLLNNFYPREAKVQWKVDNALQSGNSQESVTEQDSKDSTYSLSSTLTLSKADYEKHKVYACEVTHQGLSSPVTKSFNRGECHHHHHH

SEQ ID NO: 104 - protein, 228 aa, Artificial Sequence
  MET-R, Onartuzumab, B046-2_HC
EVQLVESGGGLVQPGGSLRLSCAASGYTFTSYWLHWVRQAPGKGLEWVGMIDPSNSDTRFNPNFKDRFTISADTSKNTAYLQMNSLRAEDTAVYYCATYRSYVTPLDYWGQGTLVTVSSASTKGPSVFPLAPSSKSTSGGTAALGCLVKDYFPEPVTVSWNSGALTSGVHTFPAVLQSSGLYSLSSVVTVPSSSLGTQTYICNVNHKPSNTKVDKKVEPKSCHHHHHH

SEQ ID NO: 105 - protein, 238 aa, Artificial Sequence
  E200+PDGFR binder PDGFRalpha, Tovetumab, B047-1_LC
GHNYTTRNILPGLNITSDIQMTQSPSSLSASVGDRVSITCRPSQSFSRYINWYQQKPGKAPKLLIHAASSLVGGVPSRFSGSGSGTDFTLTISSLQPEDFATYYCQQTYSNPPITFGQGTRLEMKRTVAAPSVFIFPPSDEQLKSGTASVVCLLNNFYPREAKVQWKVDNALQSGNSQESVTEQDSKDSTYSLSSTLTLSKADYEKHKVYACEVTHQGLSSPVTKSFNRGECHHHHHH

SEQ ID NO: 106 - protein, 229 aa, Artificial Sequence
  PDGFRalpha, Tovetumab, B047-2_HC
QVQLVESGGGLVKPGGSLRLSCAASGFTFSDYYMNWIRQAPGKGLEWVSYISSSGSIIYYADSVKGRFTISRDNAKNSLYLQMNSLRAEDTAVYYCAREGRIAARGMDVWGQGTTVTVSSASTKGPSVFPLAPSSKSTSGGTAALGCLVKDYFPEPVTVSWNSGALTSGVHTFPAVLQSSGLYSLSSVVTVPSSSLGTQTYICNVNHKPSNTKVDKKVEPKSCHHHHHH

SEQ ID NO: 107 - protein, 237 aa, Artificial Sequence
  E200+PDGFR binder PDGFRalpha, Olaratumab, B048-1_LC
GHNYTTRNILPGLNITSEIVLTQSPATLSLSPGERATLSCRASQSVSSYLAWYQQKPGQAPRLLIYDASNRATGIPARFSGSGSGTDFTLTISSLEPEDFAVYYCQQRSNWPPAFGQGTKVEIKRTVAAPSVFIFPPSDEQLKSGTASVVCLLNNFYPREAKVQWKVDNALQSGNSQESVTEQDSKDSTYSLSSTLTLSKADYEKHKVYACEVTHQGLSSPVTKSFNRGECHHHHHH

SEQ ID NO: 108 - protein, 236 aa, Artificial Sequence
  PDGFRalpha, Olaratumab, B048-2_HC
QLQLQESGPGLVKPSETLSLTCTVSGGSINSSSYYWGWLRQSPGKGLEWIGSFFYTGSTYYNPSLRSRLTISVDTSKNQFSLMLSSVTAADTAVYYCARQSTYYYGSGNYYGWFDRWDQGTLVTVSSASTKGPSVFPLAPSSKSTSGGTAALGCLVKDYFPEPVTVSWNSGALTSGVHTFPAVLQSSGLYSLSSVVTVPSSSLGTQTYICNVNHKPSNTKVDKKVEPKSCHHHHHH

SEQ ID NO: 109 - protein, 241 aa, Artificial Sequence
  E200+Her3 binder Her3, Seribantumab, B049-1_LC
GHNYTTRNILPGLNITSQSALTQPASVSGSPGQSITISCTGTSSDVGSYNVVSWYQQHPGKAPKLIIYEVSQRPSGVSNRFSGSKSGNTASLTISGLQTEDEADYYCCSYAGSSIFVIFGGGTKVTVLRTVAAPSVFIFPPSDEQLKSGTASVVCLLNNFYPREAKVQWKVDNALQSGNSQESVTEQDSKDSTYSLSSTLTLSKADYEKHKVYACEVTHQGLSSPVTKSFNRGECHHHHHH

SEQ ID NO: 110 - protein, 228 aa, Artificial Sequence
  Her3, Seribantumab, B049-2_HC
EVQLLESGGGLVQPGGSLRLSCAASGFTFSHYVMAWVRQAPGKGLEWVSSISSSGGWTLYADSVKGRFTISRDNSKNTLYLQMNSLRAEDTAVYYCTRGLKMATIFDYWGQGTLVTVSSASTKGPSVFPLAPSSKSTSGGTAALGCLVKDYFPEPVTVSWNSGALTSGVHTFPAVLQSSGLYSLSSVVTVPSSSLGTQTYICNVNHKPSNTKVDKKVEPKSCHHHHHH

SEQ ID NO: 111 - protein, 240 aa, Artificial Sequence
  E200+FRa binder  FRalpha, Farletuzumab, B050-1_LC
GHNYTTRNILPGLNITSDIQLTQSPSSLSASVGDRVTITCSVSSSISSNNLHWYQQKPGKAPKPWIYGTSNLASGVPSRFSGSGSGTDYTFTISSLQPEDIATYYCQQWSSYPYMYTFGQGTKVEIKRTVAAPSVFIFPPSDEQLKSGTASVVCLLNNFYPREAKVQWKVDNALQSGNSQESVTEQDSKDSTYSLSSTLTLSKADYEKHKVYACEVTHQGLSSPVTKSFNRGECHHHHHH

SEQ ID NO: 112 - protein, 228 aa, Artificial Sequence
  FRalpha, Farletuzumab, B050-2_HC
EVQLVESGGGVVQPGRSLRLSCSASGFTFSGYGLSWVRQAPGKGLEWVAMISSGGSYTYYADSVKGRFAISRDNAKNTLFLQMDSLRPEDTGVYFCARHGDDPAWFAYWGQGTPVTVSSASTKGPSVFPLAPSSKSTSGGTAALGCLVKDYFPEPVTVSWNSGALTSGVHTFPAVLQSSGLYSLSSVVTVPSSSLGTQTYICNVNHKPSNTKVDKKVEPKSCHHHHHH

SEQ ID NO: 113 - protein, 242 aa, Artificial Sequence
  E200+GPC3 binder  GPC3, Codrituzumab, B051-1_LC
GHNYTTRNILPGLNITSDVVMTQSPLSLPVTPGEPASISCRSSQSLVHSNRNTYLHWYLQKPGQSPQLLIYKVSNRFSGVPDRFSGSGSGTDFTLKISRVEAEDVGVYYCSQNTHVPPTFGQGTKLEIKRTVAAPSVFIFPPSDEQLKSGTASVVCLLNNFYPREAKVQWKVDNALQSGNSQESVTEQDSKDSTYSLSSTLTLSKADYEKHKVYACEVTHQGLSSPVTKSFNRGECHHHHHH

SEQ ID NO: 114 - protein, 224 aa, Artificial Sequence
  GPC3, Codrituzumab, B051-2_HC
QVQLVQSGAEVKKPGASVKVSCKASGYTFTDYEMHWVRQAPGQGLEWMGALDPKTGDTAYSQKFKGRVTLTADKSTSTAYMELSSLTSEDTAVYYCTRFYSYTYWGQGTLVTVSSASTKGPSVFPLAPSSKSTSGGTAALGCLVKDYFPEPVTVSWNSGALTSGVHTFPAVLQSSGLYSLSSVVTVPSSSLGTQTYICNVNHKPSNTKVDKKVEPKSCHHHHHH

SEQ ID NO: 115 - protein, 237 aa, Artificial Sequence
  E200+SLAMF7 binder  SLAMF7, Elotuzumab, B052-1_LC
GHNYTTRNILPGLNITSDIQMTQSPSSLSASVGDRVTITCKASQDVGIAVAWYQQKPGKVPKLLIYWASTRHTGVPDRFSGSGSGTDFTLTISSLQPEDVATYYCQQYSSYPYTFGQGTKVEIKRTVAAPSVFIFPPSDEQLKSGTASVVCLLNNFYPREAKVQWKVDNALQSGNSQESVTEQDSKDSTYSLSSTLTLSKADYEKHKVYACEVTHQGLSSPVTKSFNRGECHHHHHH

SEQ ID NO: 116 - protein, 228 aa, Artificial Sequence
  SLAMF7, Elotuzumab, B052-2_HC
EVQLVESGGGLVQPGGSLRLSCAASGFDFSRYWMSWVRQAPGKGLEWIGEINPDSSTINYAPSLKDKFIISRDNAKNSLYLQMNSLRAEDTAVYYCARPDGNYWYFDVWGQGTLVTVSSASTKGPSVFPLAPSSKSTSGGTAALGCLVKDYFPEPVTVSWNSGALTSGVHTFPAVLQSSGLYSLSSVVTVPSSSLGTQTYICNVNHKPSNTKVDKKVEPKSCHHHHHH

SEQ ID NO: 117 - protein, 236 aa, Artificial Sequence
  E200+ TNFRSF10B binder , Tigatuzumab, B053-1_LC
GHNYTTRNILPGLNITSDIQMTQSPSSLSASVGDRVTITCKASQDVGTAVAWYQQKPGKAPKLLIYWASTRHTGVPSRFSGSGSGTDFTLTISSLQPEDFATYYCQQYSSYRTFGQGTKVEIKRTVAAPSVFIFPPSDEQLKSGTASVVCLLNNFYPREAKVQWKVDNALQSGNSQESVTEQDSKDSTYSLSSTLTLSKADYEKHKVYACEVTHQGLSSPVTKSFNRGECHHHHHH

SEQ ID NO: 118 - protein, 228 aa, Artificial Sequence
  TNFRSF10B, Tigatuzumab, B053-2_HC
EVQLVESGGGLVQPGGSLRLSCAASGFTFSSYVMSWVRQAPGKGLEWVATISSGGSYTYYPDSVKGRFTISRDNAKNTLYLQMNSLRAEDTAVYYCARRGDSMITTDYWGQGTLVTVSSASTKGPSVFPLAPSSKSTSGGTAALGCLVKDYFPEPVTVSWNSGALTSGVHTFPAVLQSSGLYSLSSVVTVPSSSLGTQTYICNVNHKPSNTKVDKKVEPKSCHHHHHH

SEQ ID NO: 119 - protein, 238 aa, Artificial Sequence
  E200+ GPNMB binder, GPNMB, Glembatumumab, B054-1_LC
GHNYTTRNILPGLNITSEIVMTQSPATLSVSPGERATLSCRASQSVDNNLVWYQQKPGQAPRLLIYGASTRATGIPARFSGSGSGTEFTLTISSLQSEDFAVYYCQQYNNWPPWTFGQGTKVEIKRTVAAPSVFIFPPSDEQLKSGTASVVCLLNNFYPREAKVQWKVDNALQSGNSQESVTEQDSKDSTYSLSSTLTLSKADYEKHKVYACEVTHQGLSSPVTKSFNRGECHHHHHH

SEQ ID NO: 120 - protein, 228 aa, Artificial Sequence
  GPNMB, Glembatumumab, B054-2_HC
QVQLQESGPGLVKPSQTLSLTCTVSGGSISSFNYYWSWIRHHPGKGLEWIGYIYYSGSTYSNPSLKSRVTISVDTSKNQFSLTLSSVTAADTAVYYCARGYNWNYFDYWGQGTLVTVSSASTKGPSVFPLAPSSKSTSGGTAALGCLVKDYFPEPVTVSWNSGALTSGVHTFPAVLQSSGLYSLSSVVTVPSSSLGTQTYICNVNHKPSNTKVDKKVEPKSCHHHHHH

SEQ ID NO: 121 - protein, 237 aa, Artificial Sequence
  E200+ VEGFR2 binder, Ramucirumab, B055-1_LC
GHNYTTRNILPGLNITSDIQMTQSPSSVSASIGDRVTITCRASQGIDNWLGWYQQKPGKAPKLLIYDASNLDTGVPSRFSGSGSGTYFTLTISSLQAEDFAVYFCQQAKAFPPTFGGGTKVDIKRTVAAPSVFIFPPSDEQLKSGTASVVCLLNNFYPREAKVQWKVDNALQSGNSQESVTEQDSKDSTYSLSSTLTLSKADYEKHKVYACEVTHQGLSSPVTKSFNRGECHHHHHH

SEQ ID NO: 122 - protein, 225 aa, Artificial Sequence
  VEGFR2, Ramucirumab, B055-2_HC
EVQLVQSGGGLVKPGGSLRLSCAASGFTFSSYSMNWVRQAPGKGLEWVSSISSSSSYIYYADSVKGRFTISRDNAKNSLYLQMNSLRAEDTAVYYCARVTDAFDIWGQGTMVTVSSASTKGPSVFPLAPSSKSTSGGTAALGCLVKDYFPEPVTVSWNSGALTSGVHTFPAVLQSSGLYSLSSVVTVPSSSLGTQTYICNVNHKPSNTKVDKKVEPKSCHHHHHH

SEQ ID NO: 123 - protein, 237 aa, Artificial Sequence
  E200+ alpha4beta7 and alphaEbeta7binder, Etrolizumab, B056-1_LC
GHNYTTRNILPGLNITSDIQMTQSPSSLSASVGDRVTITCRASESVDDLLHWYQQKPGKAPKLLIKYASQSISGVPSRFSGSGSGTDFTLTISSLQPEDFATYYCQQGNSLPNTFGQGTKVEIKRTVAAPSVFIFPPSDEQLKSGTASVVCLLNNFYPREAKVQWKVDNALQSGNSQESVTEQDSKDSTYSLSSTLTLSKADYEKHKVYACEVTHQGLSSPVTKSFNRGECHHHHHH

SEQ ID NO: 124 - protein, 226 aa, Artificial Sequence
  alpha4beta7 & alphaEbeta7, Etrolizumab, B056-2_HC
EVQLVESGGGLVQPGGSLRLSCAASGFFITNNYWGWVRQAPGKGLEWVGYISYSGSTSYNPSLKSRFTISRDTSKNTFYLQMNSLRAEDTAVYYCARTGSSGYFDFWGQGTLVTVSSASTKGPSVFPLAPSSKSTSGGTAALGCLVKDYFPEPVTVSWNSGALTSGVHTFPAVLQSSGLYSLSSVVTVPSSSLGTQTYICNVNHKPSNTKVDKKVEPKSCHHHHHH

SEQ ID NO: 125 - protein, 237 aa, Artificial Sequence
  E200+ alpha4beta7 binder, alpha4beta7, Abrilumab, B057-1_LC
GHNYTTRNILPGLNITSDIQMTQSPSSVSASVGDRVTITCRASQGISSWLAWYQQKPGKAPKLLIYGASNLESGVPSRFSGSGSGTDFTLTISSLQPEDFANYYCQQANSFPWTFGQGTKVEIKRTVAAPSVFIFPPSDEQLKSGTASVVCLLNNFYPREAKVQWKVDNALQSGNSQESVTEQDSKDSTYSLSSTLTLSKADYEKHKVYACEVTHQGLSSPVTKSFNRGECHHHHHH

SEQ ID NO: 126 - protein, 227 aa, Artificial Sequence
  alpha4beta7, Abrilumab, B057-2_HC
QVQLVQSGAEVKKPGASVKVSCKVSGYTLSDLSIHWVRQAPGKGLEWMGGFDPQDGETIYAQKFQGRVTMTEDTSTDTAYMELSSLKSEDTAVYYCATGSSSSWFDPWGQGTLVTVSSASTKGPSVFPLAPSSKSTSGGTAALGCLVKDYFPEPVTVSWNSGALTSGVHTFPAVLQSSGLYSLSSVVTVPSSSLGTQTYICNVNHKPSNTKVDKKVEPKSCHHHHHH

SEQ ID NO: 127 - protein, 245 aa, Artificial Sequence
  E200+ CSPG4 binder , CSPG4, D2A-1h10-UC12, B058-1_LC
GHNYTTRNILPGLNITSRSTQSALTQPASVSGSPGQSITISCTGTSSDVGGYNYVSWYQQHPGKAPKLMIYDVSNRPSGVSKRFSGSKSGNTASLTISGLQAEDEADYYCSSYTSSSTRHVFGTGTQLTVLGRTVAAPSVFIFPPSDEQLKSGTASVVCLLNNFYPREAKVQWKVDNALQSGNSQESVTEQDSKDSTYSLSSTLTLSKADYEKHKVYACEVTHQGLSSPVTKSFNRGECHHHHHH

SEQ ID NO: 128 - protein, 227 aa, Artificial Sequence
  CSPG4, D2A-1h10-UC12, B058-2_HC
EVQLVESGAEVKKPGDSLKISCKGSGYSFTSYWIGWVRQMPGKGLEWMGIIYPGDSVTTYSPAFQGDVTISVDKSISTAYLQWNSLKASDTGIYYCARRRGNYYMDVWGNGTLVTVSSASTKGPSVFPLAPSSKSTSGGTAALGCLVKDYFPEPVTVSWNSGALTSGVHTFPAVLQSSGLYSLSSVVTVPSSSLGTQTYICNVNHKPSNTKVDKKVEPKSCHHHHHH

SEQ ID NO: 129 - protein, 240 aa, Artificial Sequence
  E200+ CD80 binder,  Galiximab, B059-1_LC
GHNYTTRNILPGLNITSESALTQPPSVSGAPGQKVTISCTGSTSNIGGYDLHWYQQLPGTAPKLLIYDINKRPSGISDRFSGSKSGTAASLAITGLQTEDEADYYCQSYDSSLNAQVFGGGTRLTVLRTVAAPSVFIFPPSDEQLKSGTASVVCLLNNFYPREAKVQWKVDNALQSGNSQESVTEQDSKDSTYSLSSTLTLSKADYEKHKVYACEVTHQGLSSPVTKSFNRGECHHHHHH

SEQ ID NO: 130 - protein, 236 aa, Artificial Sequence
  CD80, Galiximab, B059-2_HC
QVQLQESGPGLVKPSETLSLTCAVSGGSISGGYGWGWIRQPPGKGLEWIGSFYSSSGNTYYNPSLKSQVTISTDTSKNQFSLKLNSMTAADTAVYYCVRDRLFSVVGMVYNNWFDVWGPGVLVTVSSASTKGPSVFPLAPSSKSTSGGTAALGCLVKDYFPEPVTVSWNSGALTSGVHTFPAVLQSSGLYSLSSVVTVPSSSLGTQTYICNVNHKPSNTKVDKKVEPKSCHHHHHH

SEQ ID NO: 131 - protein, 242 aa, Artificial Sequence
  E200+ CCR4 binder,  Mogamulizumab, B060-1_LC
GHNYTTRNILPGLNITSDVLMTQSPLSLPVTPGEPASISCRSSRNIVHINGDTYLEWYLQKPGQSPQLLIYKVSNRFSGVPDRFSGSGSGTDFTLKISRVEAEDVGVYYCFQGSLLPWTFGQGTKVEIKRTVAAPSVFIFPPSDEQLKSGTASVVCLLNNFYPREAKVQWKVDNALQSGNSQESVTEQDSKDSTYSLSSTLTLSKADYEKHKVYACEVTHQGLSSPVTKSFNRGECHHHHHH

SEQ ID NO: 132 - protein, 228 aa, Artificial Sequence
  CCR4, Mogamulizumab, B060-2_HC
EVQLVESGGDLVQPGRSLRLSCAASGFIFSNYGMSWVRQAPGKGLEWVATISSASTYSYYPDSVKGRFTISRDNAKNSLYLQMNSLRVEDTALYYCGRHSDGNFAFGYWGQGTLVTVSSASTKGPSVFPLAPSSKSTSGGTAALGCLVKDYFPEPVTVSWNSGALTSGVHTFPAVLQSSGLYSLSSVVTVPSSSLGTQTYICNVNHKPSNTKVDKKVEPKSCHHHHHH

SEQ ID NO: 133 - protein, 236 aa, Artificial Sequence
  E200+ CD115 binder,  CD115-CSF-1R, Emactuzumab, B061-1_LC
GHNYTTRNILPGLNITSDIQMTQSPSSLSASVGDRVTITCRASEDVNTYVSWYQQKPGKAPKLLIYAASNRYTGVPSRFSGSGSGTDFTLTISSLQPEDFATYYCQQSFSYPTFGQGTKLEIKRTVAAPSVFIFPPSDEQLKSGTASVVCLLNNFYPREAKVQWKVDNALQSGNSQESVTEQDSKDSTYSLSSTLTLSKADYEKHKVYACEVTHQGLSSPVTKSFNRGECHHHHHH

SEQ ID NO: 134 - protein, 225 aa, Artificial Sequence
  CD115-CSF-1R, Emactuzumab, B061-2_HC
QVQLVQSGAEVKKPGASVKVSCKASGYTFTSYDISWVRQAPGQGLEWMGVIWTDGGTNYAQKLQGRVTMTTDTSTSTAYMELRSLRSDDTAVYYCARDQRLYFDVWGQGTTVTVSSASTKGPSVFPLAPSSKSTSGGTAALGCLVKDYFPEPVTVSWNSGALTSGVHTFPAVLQSSGLYSLSSVVTVPSSSLGTQTYICNVNHKPSNTKVDKKVEPKSCHHHHHH

SEQ ID NO: 135 - protein, 236 aa, Artificial Sequence
  E200+ ENOX-2 binder ,  ENOX-2, US9459256, B062-1_LC
GHNYTTRNILPGLNITSENVLTQSPAIMSASPGERVTMTCSASSSIRYIYWYQQKPGSSPRLLIYDTSNVAPGVPFRFSGSGSGTSYSLTINRMEAEDAATYYCQEWSGYPYTFGGGTKLELKRTVAAPSVFIFPPSDEQLKSGTASVVCLLNNFYPREAKVQWKVDNALQSGNSQESVTEQDSKDSTYSLSSTLTLSKADYEKHKVYACEVTHQGLSSPVTKSFNRGECHHHHHH

SEQ ID NO: 136 - protein, 228 aa, Artificial Sequence
  ENOX-2, US9459256, B062-2_HC
EVKLQESGTEVVKPGASVKLSCKASGYIFTSYDIDWVRQTPEQGLEWIGWIFPGEGSTEYNEKFKGRATLSVDKSSSTAYMELTRLTSEDSAVYFCARGDYYRRYFDLWGQGTTVTVSSASTKGPSVFPLAPSSKSTSGGTAALGCLVKDYFPEPVTVSWNSGALTSGVHTFPAVLQSSGLYSLSSVVTVPSSSLGTQTYICNVNHKPSNTKVDKKVEPKSCHHHHHH

SEQ ID NO: 137 - protein, 242 aa, Artificial Sequence
  E200+ CD56 binder ,  CD56, Lorvotuzumab, B063-1_LC
GHNYTTRNILPGLNITSDVVMTQSPLSLPVTLGQPASISCRSSQIIIHSDGNTYLEWFQQRPGQSPRRLIYKVSNRFSGVPDRFSGSGSGTDFTLKISRVEAEDVGVYYCFQGSHVPHTFGQGTKVEIKRTVAAPSVFIFPPSDEQLKSGTASVVCLLNNFYPREAKVQWKVDNALQSGNSQESVTEQDSKDSTYSLSSTLTLSKADYEKHKVYACEVTHQGLSSPVTKSFNRGECHHHHHH

SEQ ID NO: 138 - protein, 227 aa, Artificial Sequence
  CD56, lLorvotuzumab, B063-2_HC
QVQLVESGGGVVQPGRSLRLSCAASGFTFSSFGMHWVRQAPGKGLEWVAYISSGSFTIYYADSVKGRFTISRDNSKNTLYLQMNSLRAEDTAVYYCARMRKGYAMDYWGQGTLVTVSSASTKGPSVFPLAPSSKSTSGGTAALGCLVKDYFPEPVTVSWNSGALTSGVHTFPAVLQSSGLYSLSSVVTVPSSSLGTQTYICNVNHKPSNTKVDKKVEPKSCHHHHHH

SEQ ID NO: 139 - protein, 237 aa, Artificial Sequence
  E200+ huVH1-69 binder ,  huVH1-69, B075-1_LC
GHNYTTRNILPGLNITSDIQLTQSPSSLSASVGDRVTITCRASQGISSNIVWLQQKPGKAPKGLIYHGTNLESGVPSRFSGSGSGTDYTLTISSLEPEDFATYYCVQYSQFPPTFGQGTKLEIKRTVAAPSVFIFPPSDEQLKSGTASVVCLLNNFYPREAKVQWKVDNALQSGNSQESVTEQDSKDSTYSLSSTLTLSKADYEKHKVYACEVTHQGLSSPVTKSFNRGECHHHHHH

SEQ ID NO: 140 - protein, 227 aa, Artificial Sequence
  huVH1-69, B075-2_HC
QVQLVQSGAEVVKPGASVKVSCKASGYTFTSYWMHWVKQAPGQGLEWIGAVSPGNSDTSYNEKFKGKATLTVDTSASTAYMELSSLRSEDTAVYYCTRSRYGNNALDYWGQGTLVTVSASTKGPSVFPLAPSSKSTSGGTAALGCLVKDYFPEPVTVSWNSGALTSGVHTFPAVLQSSGLYSLSSVVTVPSSSLGTQTYICNVNHKPSNTKVDKKVEPKSCHHHHHH

SEQ ID NO: 141 - protein, 457 aa, Artificial Sequence
  CD19, Tafasitamab,OR19_1, wt-IgG1, HC
EVQLVESGGGLVKPGGSLKLSCAASGYTFTSYVMHWVRQAPGKGLEWIGYINPYNDGTKYNEKFQGRVTISSDKSISTAYMELSSLRSEDTAMYYCARGTYYYGTRVFDYWGQGTLVTVSSASTKGPSVFPLAPSSKSTSGGTAALGCLVKDYFPEPVTVSWNSGALTSGVHTFPAVLQSSGLYSLSSVVTVPSSSLGTQTYICNVNHKPSNTKVDKKVEPKSCDKTHTCPPCPAPELLGGPSVFLFPPKPKDTLMISRTPEVTCVVVDVSHEDPEVKFNWYVDGVEVHNAKTKPREEQYNSTYRVVSVLTVLHQDWLNGKEYKCKVSNKALPAPIEKTISKAKGQPREPQVYTLPPSRDELTKNQVSLTCLVKGFYPSDIAVEWESNGQPENNYKTTPPVLDSDGSFFLYSKLTVDKSRWQQGNVFSCSVMHEALHNHYTQKSLSLSPGKHHHHHH

SEQ ID NO: 142 - protein, 457 aa, Artificial Sequence
  CD19, Tafasitamab,OR19_2, IgG1-SDIE, HC
EVQLVESGGGLVKPGGSLKLSCAASGYTFTSYVMHWVRQAPGKGLEWIGYINPYNDGTKYNEKFQGRVTISSDKSISTAYMELSSLRSEDTAMYYCARGTYYYGTRVFDYWGQGTLVTVSSASTKGPSVFPLAPSSKSTSGGTAALGCLVKDYFPEPVTVSWNSGALTSGVHTFPAVLQSSGLYSLSSVVTVPSSSLGTQTYICNVNHKPSNTKVDKKVEPKSCDKTHTCPPCPAPELLGGPDVFLFPPKPKDTLMISRTPEVTCVVVDVSHEDPEVKFNWYVDGVEVHNAKTKPREEQYNSTYRVVSVLTVLHQDWLNGKEYKCKVSNKALPAPEEKTISKAKGQPREPQVYTLPPSRDELTKNQVSLTCLVKGFYPSDIAVEWESNGQPENNYKTTPPVLDSDGSFFLYSKLTVDKSRWQQGNVFSCSVMHEALHNHYTQKSLSLSPGKHHHHHH

SEQ ID NO: 143 - protein, 230 aa, Artificial Sequence; identical to SEQ ID NO: 52
  CD19, Tafasitamab, B020-2_Heavy chain

SEQ ID NO: 144 - protein, 219 aa, Artificial Sequence
  CD19, Tafasitamab, OR19_7 Light chain
DIVMTQSPATLSLSPGERATLSCRSSKSLQNVNGNTYLYWFQQKPGQSPQLLIYRMSNLNSGVPDRFSGSGSGTEFTLTISSLEPEDFAVYYCMQHLEYPITFGAGTKLEIKRTVAAPSVFIFPPSDEQLKSGTASVVCLLNNFYPREAKVQWKVDNALQSGNSQESVTEQDSKDSTYSLSSTLTLSKADYEKHKVYACEVTHQGLSSPVTKSFNRGEC

SEQ ID NO: 145 - protein, 236 aa, Artificial Sequence
  E200+ CD19 binder,  CD19, Tafasitamab, Light chain OR19_8
GHNYTTRNILPGLNITSDIVMTQSPATLSLSPGERATLSCRSSKSLQNVNGNTYLYWFQQKPGQSPQLLIYRMSNLNSGVPDRFSGSGSGTEFTLTISSLEPEDFAVYYCMQHLEYPITFGAGTKLEIKRTVAAPSVFIFPPSDEQLKSGTASVVCLLNNFYPREAKVQWKVDNALQSGNSQESVTEQDSKDSTYSLSSTLTLSKADYEKHKVYACEVTHQGLSSPVTKSFNRGEC

SEQ ID NO: 146 - protein, 241 aa, Artificial Sequence
  E200+ CD19 binder,  CD19, Tafasitamab, Light chainOR19_9
GHNYTTRNILPGLNITSGGGGSDIVMTQSPATLSLSPGERATLSCRSSKSLQNVNGNTYLYWFQQKPGQSPQLLIYRMSNLNSGVPDRFSGSGSGTEFTLTISSLEPEDFAVYYCMQHLEYPITFGAGTKLEIKRTVAAPSVFIFPPSDEQLKSGTASVVCLLNNFYPREAKVQWKVDNALQSGNSQESVTEQDSKDSTYSLSSTLTLSKADYEKHKVYACEVTHQGLSSPVTKSFNRGEC

SEQ ID NO: 147 - protein, 251 aa, Artificial Sequence
  E200+ CD19 binder,  CD19, Tafasitamab, Light chain OR19_10
GHNYTTRNILPGLNITSGGGGSGGGGSGGGGSDIVMTQSPATLSLSPGERATLSCRSSKSLQNVNGNTYLYWFQQKPGQSPQLLIYRMSNLNSGVPDRFSGSGSGTEFTLTISSLEPEDFAVYYCMQHLEYPITFGAGTKLEIKRTVAAPSVFIFPPSDEQLKSGTASVVCLLNNFYPREAKVQWKVDNALQSGNSQESVTEQDSKDSTYSLSSTLTLSKADYEKHKVYACEVTHQGLSSPVTKSFNRGEC

SEQ ID NO: 148 - protein, 246 aa, Artificial Sequence
  E200+ CD19 binder ,  CD19, Tafasitamab, Light chain OR19_11
GHNYTTRNILPGLNITSTFHKTSGSGKDIVMTQSPATLSLSPGERATLSCRSSKSLQNVNGNTYLYWFQQKPGQSPQLLIYRMSNLNSGVPDRFSGSGSGTEFTLTISSLEPEDFAVYYCMQHLEYPITFGAGTKLEIKRTVAAPSVFIFPPSDEQLKSGTASVVCLLNNFYPREAKVQWKVDNALQSGNSQESVTEQDSKDSTYSLSSTLTLSKADYEKHKVYACEVTHQGLSSPVTKSFNRGEC

SEQ ID NO: 149 - protein, 241 aa, Artificial Sequence
  E200+ CD19 binder,  CD19, tafasitamab, Light chain OR19_12
GHNYTTRNILPGLNITSTFHKTDIVMTQSPATLSLSPGERATLSCRSSKSLQNVNGNTYLYWFQQKPGQSPQLLIYRMSNLNSGVPDRFSGSGSGTEFTLTISSLEPEDFAVYYCMQHLEYPITFGAGTKLEIKRTVAAPSVFIFPPSDEQLKSGTASVVCLLNNFYPREAKVQWKVDNALQSGNSQESVTEQDSKDSTYSLSSTLTLSKADYEKHKVYACEVTHQGLSSPVTKSFNRGEC

SEQ ID NO: 150 - protein, 243 aa, Artificial Sequence
  E200+ CD19 binder,  CD19, Tafasitamab, Light chain OR19_13
GHNYTTRNILPGLNITSTFHKTGSDIVMTQSPATLSLSPGERATLSCRSSKSLQNVNGNTYLYWFQQKPGQSPQLLIYRMSNLNSGVPDRFSGSGSGTEFTLTISSLEPEDFAVYYCMQHLEYPITFGAGTKLEIKRTVAAPSVFIFPPSDEQLKSGTASVVCLLNNFYPREAKVQWKVDNALQSGNSQESVTEQDSKDSTYSLSSTLTLSKADYEKHKVYACEVTHQGLSSPVTKSFNRGEC

SEQ ID NO: 151 - protein, 241 aa, Artificial Sequence
  E200+ CD19 binder ,  CD19, Tafasitamab, Light chain OR19_14
GHNYTTRNILPGLNITSTFHGSDIVMTQSPATLSLSPGERATLSCRSSKSLQNVNGNTYLYWFQQKPGQSPQLLIYRMSNLNSGVPDRFSGSGSGTEFTLTISSLEPEDFAVYYCMQHLEYPITFGAGTKLEIKRTVAAPSVFIFPPSDEQLKSGTASVVCLLNNFYPREAKVQWKVDNALQSGNSQESVTEQDSKDSTYSLSSTLTLSKADYEKHKVYACEVTHQGLSSPVTKSFNRGEC

SEQ ID NO: 152 - protein, 238 aa, Artificial Sequence
  E200+ CD19 binder,  CD19, Tafasitamab, Light chain OR19_15
GHNYTTRNILPGLNITSGSDIVMTQSPATLSLSPGERATLSCRSSKSLQNVNGNTYLYWFQQKPGQSPQLLIYRMSNLNSGVPDRFSGSGSGTEFTLTISSLEPEDFAVYYCMQHLEYPITFGAGTKLEIKRTVAAPSVFIFPPSDEQLKSGTASVVCLLNNFYPREAKVQWKVDNALQSGNSQESVTEQDSKDSTYSLSSTLTLSKADYEKHKVYACEVTHQGLSSPVTKSFNRGEC

SEQ ID NO: 153 - protein, 244 aa, Artificial Sequence
  E200+ CD19 binder,  CD19, Tafasitamab, Light chain OR19_NEW_001
DFPGHNYTTRNILPGLNITSGGGGSDIVMTQSPATLSLSPGERATLSCRSSKSLQNVNGNTYLYWFQQKPGQSPQLLIYRMSNLNSGVPDRFSGSGSGTEFTLTISSLEPEDFAVYYCMQHLEYPITFGAGTKLEIKRTVAAPSVFIFPPSDEQLKSGTASVVCLLNNFYPREAKVQWKVDNALQSGNSQESVTEQDSKDSTYSLSSTLTLSKADYEKHKVYACEVTHQGLSSPVTKSFNRGEC

SEQ ID NO: 154 - protein, 244 aa, Artificial Sequence; identical to SEQ ID NO: 153
  E200+ CD19 binder,  CD19, Tafasitamab, Light chain OR19_NEW_002

SEQ ID NO: 155 - protein, 249 aa, Artificial Sequence
  E200+ CD19 binder,  CD19, Tafasitamab, Light chain OR19_NEW_003
DFPGHNYTTRNILPGLNITSGGGGSGGGGSDIVMTQSPATLSLSPGERATLSCRSSKSLQNVNGNTYLYWFQQKPGQSPQLLIYRMSNLNSGVPDRFSGSGSGTEFTLTISSLEPEDFAVYYCMQHLEYPITFGAGTKLEIKRTVAAPSVFIFPPSDEQLKSGTASVVCLLNNFYPREAKVQWKVDNALQSGNSQESVTEQDSKDSTYSLSSTLTLSKADYEKHKVYACEVTHQGLSSPVTKSFNRGEC

SEQ ID NO: 156 - protein, 254 aa, Artificial Sequence
  E200+ CD19 binder,  CD19, Tafasitamab, Light chain OR19_NEW_004
DFPGHNYTTRNILPGLNITSGGGGSGGGGSGGGGSDIVMTQSPATLSLSPGERATLSCRSSKSLQNVNGNTYLYWFQQKPGQSPQLLIYRMSNLNSGVPDRFSGSGSGTEFTLTISSLEPEDFAVYYCMQHLEYPITFGAGTKLEIKRTVAAPSVFIFPPSDEQLKSGTASVVCLLNNFYPREAKVQWKVDNALQSGNSQESVTEQDSKDSTYSLSSTLTLSKADYEKHKVYACEVTHQGLSSPVTKSFNRGEC

SEQ ID NO: 157 - protein, 249 aa, Artificial Sequence
  E200+ CD19 binder,  CD19, Tafasitamab, Light chain OR19_NEW_005
DFPGHNYTTRNILPGLNITSTFHKTSGSGKDIVMTQSPATLSLSPGERATLSCRSSKSLQNVNGNTYLYWFQQKPGQSPQLLIYRMSNLNSGVPDRFSGSGSGTEFTLTISSLEPEDFAVYYCMQHLEYPITFGAGTKLEIKRTVAAPSVFIFPPSDEQLKSGTASVVCLLNNFYPREAKVQWKVDNALQSGNSQESVTEQDSKDSTYSLSSTLTLSKADYEKHKVYACEVTHQGLSSPVTKSFNRGEC

SEQ ID NO: 158 - protein, 251 aa, Artificial Sequence
  E200+ CD19 binder ,  CD19, Tafasitamab, Light chainOR19_NEW_006
DFPGHNYTTRNILPGLNITSTFHKTSGSGKGSDIVMTQSPATLSLSPGERATLSCRSSKSLQNVNGNTYLYWFQQKPGQSPQLLIYRMSNLNSGVPDRFSGSGSGTEFTLTISSLEPEDFAVYYCMQHLEYPITFGAGTKLEIKRTVAAPSVFIFPPSDEQLKSGTASVVCLLNNFYPREAKVQWKVDNALQSGNSQESVTEQDSKDSTYSLSSTLTLSKADYEKHKVYACEVTHQGLSSPVTKSFNRGEC

SEQ ID NO: 159 - protein, 254 aa, Artificial Sequence
  E200+ CD19 binder ,  CD19, Tafasitamab, Light chain OR19_NEW_007
DFPGHNYTTRNILPGLNITSTFHKTSGSGKGGGGSDIVMTQSPATLSLSPGERATLSCRSSKSLQNVNGNTYLYWFQQKPGQSPQLLIYRMSNLNSGVPDRFSGSGSGTEFTLTISSLEPEDFAVYYCMQHLEYPITFGAGTKLEIKRTVAAPSVFIFPPSDEQLKSGTASVVCLLNNFYPREAKVQWKVDNALQSGNSQESVTEQDSKDSTYSLSSTLTLSKADYEKHKVYACEVTHQGLSSPVTKSFNRGEC

SEQ ID NO: 160 - protein, 247 aa, Artificial Sequence
  E200+ CD19 binder ,  CD19, Tafasitamab, Light chain OR19_NEW_008
DFPGHNYTTRNILPGLNITSTFHGGGGSDIVMTQSPATLSLSPGERATLSCRSSKSLQNVNGNTYLYWFQQKPGQSPQLLIYRMSNLNSGVPDRFSGSGSGTEFTLTISSLEPEDFAVYYCMQHLEYPITFGAGTKLEIKRTVAAPSVFIFPPSDEQLKSGTASVVCLLNNFYPREAKVQWKVDNALQSGNSQESVTEQDSKDSTYSLSSTLTLSKADYEKHKVYACEVTHQGLSSPVTKSFNRGEC

SEQ ID NO: 161 - protein, 244 aa, Artificial Sequence
  E200+ CD19 binder ,  CD19, Tafasitamab, Light chain OR19_NEW_009
GHNYTTRNILPGLNITSTFHGGGGSDIVMTQSPATLSLSPGERATLSCRSSKSLQNVNGNTYLYWFQQKPGQSPQLLIYRMSNLNSGVPDRFSGSGSGTEFTLTISSLEPEDFAVYYCMQHLEYPITFGAGTKLEIKRTVAAPSVFIFPPSDEQLKSGTASVVCLLNNFYPREAKVQWKVDNALQSGNSQESVTEQDSKDSTYSLSSTLTLSKADYEKHKVYACEVTHQGLSSPVTKSFNRGEC

SEQ ID NO: 162 - protein, 249 aa, Artificial Sequence
  E200+ CD19 binder ,  CD19, Tafasitamab, Light chain OR19_NEW_010
DFPGHNYTTRNILPGLNITSTFHKTGGGGSDIVMTQSPATLSLSPGERATLSCRSSKSLQNVNGNTYLYWFQQKPGQSPQLLIYRMSNLNSGVPDRFSGSGSGTEFTLTISSLEPEDFAVYYCMQHLEYPITFGAGTKLEIKRTVAAPSVFIFPPSDEQLKSGTASVVCLLNNFYPREAKVQWKVDNALQSGNSQESVTEQDSKDSTYSLSSTLTLSKADYEKHKVYACEVTHQGLSSPVTKSFNRGEC

SEQ ID NO: 163 - protein, 246 aa, Artificial Sequence
  E200+ CD19 binder ,  CD19, Tafasitamab, Light chain OR19_NEW_011
GHNYTTRNILPGLNITSTFHKTGGGGSDIVMTQSPATLSLSPGERATLSCRSSKSLQNVNGNTYLYWFQQKPGQSPQLLIYRMSNLNSGVPDRFSGSGSGTEFTLTISSLEPEDFAVYYCMQHLEYPITFGAGTKLEIKRTVAAPSVFIFPPSDEQLKSGTASVVCLLNNFYPREAKVQWKVDNALQSGNSQESVTEQDSKDSTYSLSSTLTLSKADYEKHKVYACEVTHQGLSSPVTKSFNRGEC

SEQ ID NO: 164 - protein, 246 aa, Artificial Sequence
  E200+ CD19 binder ,  CD19, Tafasitamab, Light chain OR19_NEW_012
GHNYTTRNILPGLNITSGGGGSGGGGSDIVMTQSPATLSLSPGERATLSCRSSKSLQNVNGNTYLYWFQQKPGQSPQLLIYRMSNLNSGVPDRFSGSGSGTEFTLTISSLEPEDFAVYYCMQHLEYPITFGAGTKLEIKRTVAAPSVFIFPPSDEQLKSGTASVVCLLNNFYPREAKVQWKVDNALQSGNSQESVTEQDSKDSTYSLSSTLTLSKADYEKHKVYACEVTHQGLSSPVTKSFNRGEC

SEQ ID NO: 165 - protein, 786 aa, Artificial Sequence
  CAR7
MALPVTALLLPLALLLHAARPEVQLLESGGGLVQPGGSLRLSCAASGFTFRNHDMGWVRQAPGKGLEWVSAISGSGGSTYYANSVKGRFTISRDNSKNTLYLQMNSLRAEDTAVYYCAEPKPMDTEFDYRSPGTLVTVSSRAAAIEVMYPPPYLDNEKSNGTIIHVKGKHLCPSPLFPGPSKPFWVLVVVGGVLACYSLLVTVAFIIFWVRSKRSRLLHSDYMNMTPRRPGPTRKHYQPYAPPRDFAAYRSKRGRKKLLYIFKQPFMRPVQTTQEEDGCSCRFPEEEEGGCELRVKFSRSADAPAYKQGQNQLYNELNLGRREEYDVLDKRRGRDPEMGGKPRRKNPQEGLYNELQKDKMAEAYSEIGMKGERRRGKGHDGLYQGLSTATKDTYDALHMQALPPRLEGGGEGRGSLLTCGDVEENPGPRMLLLVTSLLLCELPHPAFLLIPRKVCNGIGIGEFKDSLSINATNIKHFKNCTSISGDLHILPVAFRGDSFTHTPPLDPQELDILKTVKEITGFLLIQAWPENRTDLHAFENLEIIRGRTKQHGQFSLAVVSLNITSLGLRSLKEISDGDVIISGNKNLCYANTINWKKLFGTSGQKTKIISNRGENSCKATGQVCHALCSPEGCWGPEPRDCVSCRNVSRGRECVDKCNLLEGEPREFVENSECIQCHPECLPQAMNITCTGRGPDNCIQCAHYIDGPHCVKTCPAGVMGENNTLVWKYADAGHVCHLCHPNCTYGCTGPGLEGCPTNGPKIPSIATGMVGALLLLLVVALGIGLFM

SEQ ID NO: 166 - protein, 788 aa, Artificial Sequence
  CAR10
MALPVTALLLPLALLLHAARPEVQLLESGGGLVQPGGSLRLSCAASGFTFRNHDMGWVRQAPGKGLEWVSAISGSGGSTYYANSVKGRFTISRDNSKNTLYLQMNSLRAEDTAVYYCAEPKPMDTEFDYRSPGTLVTVSSTTTPAPRPPTPAPTIASQPLSLRPEACRPAAGGAVHTRGLDFACDFWVLVVVGGVLACYSLLVTVAFIIFWVRSKRSRLLHSDYMNMTPRRPGPTRKHYQPYAPPRDFAAYRSKRGRKKLLYIFKQPFMRPVQTTQEEDGCSCRFPEEEEGGCELRVKFSRSADAPAYKQGQNQLYNELNLGRREEYDVLDKRRGRDPEMGGKPRRKNPQEGLYNELQKDKMAEAYSEIGMKGERRRGKGHDGLYQGLSTATKDTYDALHMQALPPRLEGGGEGRGSLLTCGDVEENPGPRMLLLVTSLLLCELPHPAFLLIPRKVCNGIGIGEFKDSLSINATNIKHFKNCTSISGDLHILPVAFRGDSFTHTPPLDPQELDILKTVKEITGFLLIQAWPENRTDLHAFENLEIIRGRTKQHGQFSLAVVSLNITSLGLRSLKEISDGDVIISGNKNLCYANTINWKKLFGTSGQKTKIISNRGENSCKATGQVCHALCSPEGCWGPEPRDCVSCRNVSRGRECVDKCNLLEGEPREFVENSECIQCHPECLPQAMNITCTGRGPDNCIQCAHYIDGPHCVKTCPAGVMGENNTLVWKYADAGHVCHLCHPNCTYGCTGPGLEGCPTNGPKIPSIATGMVGALLLLLVVALGIGLFM

SEQ ID NO: 167 - protein, 755 aa, Artificial Sequence
  CAR16
MALPVTALLLPLALLLHAARPEVQLLESGGGLVQPGGSLRLSCAASGFTFRNHDMGWVRQAPGKGLEWVSAISGSGGSTYYANSVKGRFTISRDNSKNTLYLQMNSLRAEDTAVYYCAEPKPMDTEFDYRSPGTLVTVSSESKYGPPCPPCPFWVLVVVGGVLACYSLLVTVAFIIFWVRSKRSRLLHSDYMNMTPRRPGPTRKHYQPYAPPRDFAAYRSKRGRKKLLYIFKQPFMRPVQTTQEEDGCSCRFPEEEEGGCELRVKFSRSADAPAYKQGQNQLYNELNLGRREEYDVLDKRRGRDPEMGGKPRRKNPQEGLYNELQKDKMAEAYSEIGMKGERRRGKGHDGLYQGLSTATKDTYDALHMQALPPRLEGGGEGRGSLLTCGDVEENPGPRMLLLVTSLLLCELPHPAFLLIPRKVCNGIGIGEFKDSLSINATNIKHFKNCTSISGDLHILPVAFRGDSFTHTPPLDPQELDILKTVKEITGFLLIQAWPENRTDLHAFENLEIIRGRTKQHGQFSLAVVSLNITSLGLRSLKEISDGDVIISGNKNLCYANTINWKKLFGTSGQKTKIISNRGENSCKATGQVCHALCSPEGCWGPEPRDCVSCRNVSRGRECVDKCNLLEGEPREFVENSECIQCHPECLPQAMNITCTGRGPDNCIQCAHYIDGPHCVKTCPAGVMGENNTLVWKYADAGHVCHLCHPNCTYGCTGPGLEGCPTNGPKIPSIATGMVGALLLLLVVALGIGLFM

SEQ ID NO: 168 - protein, 32 aa, Artificial Sequence
  E200_3xG4S
GHNYTTRNILPGLNITSGGGGSGGGGSGGGGS

SEQ ID NO: 169 - protein, 236 aa, Artificial Sequence
  E200+CD117 binder , WO2019084067, mAb-55, B076-1_LC
GHNYTTRNILPGLNITSDIQMTQSPSSLSASVGDRVTITCRASQSINSYLNWYQQKPGKAPKLLIYAASSLQSGVPSRFSGSGSGTDFTLTISSLQPEDFATYYCQQGVSDITFGGGTKVEIKRTVAAPSVFIFPPSDEQLKSGTASVVCLLNNFYPREAKVQWKVDNALQSGNSQESVTEQDSKDSTYSLSSTLTLSKADYEKHKVYACEVTHQGLSSPVTKSFNRGECHHHHHH

SEQ ID NO: 170 - protein, 228 aa, Artificial Sequence
  CD117, WO2019084067, mAb-55, B076-2_HC
QVQLVQSGAEVKKPGSSVKVSCKASGGTFRIYAISWVRQAPGQGLEWMGGIIPDFGVANYAQKFQGRVTITADESTSTAYMELSSLRSEDTAVYYCARGGLDTDEFDLWGRGTLVTVSSASTKGPSVFPLAPSSKSTSGGTAALGCLVKDYFPEPVTVSWNSGALTSGVHTFPAVLQSSGLYSLSSVVTVPSSSLGTQTYICNVNHKPSNTKVDKKVEPKSCHHHHHH

SEQ ID NO: 171 - protein, 236 aa, Artificial Sequence
  E200+CD133 binder , CA2962157, RW03, B077-1_LC
GHNYTTRNILPGLNITSDIQMTQSPSSLSASVGDRVTITCRASQGSSYVAWYQQKPGKAPKLLIYSASYLYSGVPSRFSGSRSGTDFTLTISSLQPEDFATYYCQQGVWSLITFGQGTKVEIKRTVAAPSVFIFPPSDEQLKSGTASVVCLLNNFYPREAKVQWKVDNALQSGNSQESVTEQDSKDSTYSLSSTLTLSKADYEKHKVYACEVTHQGLSSPVTKSFNRGECHHHHHH

SEQ ID NO: 172 - protein, 227 aa, Artificial Sequence
  CD133, CA2962157, RW03, B077-2_HC
EVQLVESGGGLVQPGGSLRLSCAASGFNLSSSSIHWVRQAPGKGLEWVAYIYPYYSYTYYADSVKGRFTISADTSKNTAYLQMNSLRAEDTAVYYCAREGSVAGEDYWGQGTLVTVSSASTKGPSVFPLAPSSKSTSGGTAALGCLVKDYFPEPVTVSWNSGALTSGVHTFPAVLQSSGLYSLSSVVTVPSSSLGTQTYICNVNHKPSNTKVDKKVEPKSCHHHHHH

SEQ ID NO: 173 - protein, 243 aa, Artificial Sequence
  E200+MUC1 binder , WO2016130726A1, B078-1_LC
GHNYTTRNILPGLNITSDIVMTQSPDSLAVSLGERATINCKSSQSLLNSGDQKNYLTWYQQKPGQPPKLLIYWASTRESGVPDRFSGSGSGTDFTLTISSLQAEDVAVYYCQNDYSYPLTFGQGTKVEIKRTVAAPSVFIFPPSDEQLKSGTASVVCLLNNFYPREAKVQWKVDNALQSGNSQESVTEQDSKDSTYSLSSTLTLSKADYEKHKVYACEVTHQGLSSPVTKSFNRGECHHHHHH

SEQ ID NO: 174 - protein, 225 aa, Artificial Sequence
  MUC1, WO2016130726A1, B078-2_HC
QVQLVQSGAEVKKTGSSVKVSCKASGYTFTDHAIHWVRQAPGQALEWMGHFSPGNTDIKYNDKFKGRVTLTVDRSMSTAYMELSSLRSEDTAMYYCKTSTFFFDYWGQGTMVTVSSASTKGPSVFPLAPSSKSTSGGTAALGCLVKDYFPEPVTVSWNSGALTSGVHTFPAVLQSSGLYSLSSVVTVPSSSLGTQTYICNVNHKPSNTKVDKKVEPKSCHHHHHH

SEQ ID NO: 175 - protein, 237 aa, Artificial Sequence
  E200+MSLN binder , WO2009120769, B079-1_LC
GHNYTTRNILPGLNITSDIQMTQSPSSLSASVGDRVTITCRASQSISSYLNWYQQKPGKAPKLLIYAASSLQSGVPSGFSGSGSGTDFTLTISSLQPEDFATYYCQQSYSTPLTFGGGTKVEIKRTVAAPSVFIFPPSDEQLKSGTASVVCLLNNFYPREAKVQWKVDNALQSGNSQESVTEQDSKDSTYSLSSTLTLSKADYEKHKVYACEVTHQGLSSPVTKSFNRGECHHHHHH

SEQ ID NO: 176 - protein, 228 aa, Artificial Sequence
  MSLN, WO2009120769, B079-2_HC
QVQLQESGPGLVKPSETLSLTCTVSGGSVSSGSYYWSWIRQPPGKGLEWIGYIYYSGSTNYNPSLKSRVTISVDTSKNQFSLKLSSVTAADTAVYYCAREGKNGAFDIWGQGTMVTVSSASTKGPSVFPLAPSSKSTSGGTAALGCLVKDYFPEPVTVSWNSGALTSGVHTFPAVLQSSGLYSLSSVVTVPSSSLGTQTYICNVNHKPSNTKVDKKVEPKSCHHHHHH

SEQ ID NO: 177 - protein, 241 aa, Artificial Sequence
  E200+ROR2 binder , WO2016142768A1, B080-1_LC
GHNYTTRNILPGLNITSQSALTQPASVSGSPGQSITISCTGTSGDVGGYNYVSWYQHHPGKAPKLIIYDVNKRPSGFSDRFSGSKSGNTASLTISGLQAEDEADYYCSSYTSTSTVFGGGTKLTVLGKRTVAAPSVFIFPPSDEQLKSGTASVVCLLNNFYPREAKVQWKVDNALQSGNSQESVTEQDSKDSTYSLSSTLTLSKADYEKHKVYACEVTHQGLSSPVTKSFNRGECHHHHHH

SEQ ID NO: 178 - protein, 230 aa, Artificial Sequence
  ROR2, WO2016142768A1, B080-2_HC
QITLKESGPELVKPTQTLTLTCTFSGFSLSTSGMSVSWIRQPPGKALEWLARIDWDDDKYYSTSLKTRLTISKDTSKNQVVLTMTNTDPVDTATYYCARGFYLAYGSYDSWGQGTLVTVSSASTKGPSVFPLAPSSKSTSGGTAALGCLVKDYFPEPVTVSWNSGALTSGVHTFPAVLQSSGLYSLSSVVTVPSSSLGTQTYICNVNHKPSNTKVDKKVEPKSCHHHHHH

SEQ ID NO: 179 - protein, 238 aa, Artificial Sequence
  E200+IL13Ra2 binder , WO2014072888A1, B081-1_LC
GHNYTTRNILPGLNITSDIQMTQSPSSLSASVGDRVTITCTASLSVSSTYLHWYQQKPGSSPKLWIYSTSNLASGVPSRFSGSGSGTSFTLTISSLQPEDFATYYCHQYHRSPLTFGGGTKVEIKRTVAAPSVFIFPPSDEQLKSGTASVVCLLNNFYPREAKVQWKVDNALQSGNSQESVTEQDSKDSTYSLSSTLTLSKADYEKHKVYACEVTHQGLSSPVTKSFNRGECHHHHHH

SEQ ID NO: 180 - protein, 225 aa, Artificial Sequence
  IL13Ra2, WO2014072888A1, B081-2_HC
EVQLVESGGGLVQPGGSLRLSCAASGFSLTKYGVHWVRQAPGKGLEWVGVKWAGGSTDYNSALMSRFTISKDNAKNSLYLQMNSLRAEDTAVYYCARDHRDAMDYWGQGTLVTVSSASTKGPSVFPLAPSSKSTSGGTAALGCLVKDYFPEPVTVSWNSGALTSGVHTFPAVLQSSGLYSLSSVVTVPSSSLGTQTYICNVNHKPSNTKVDKKVEPKSCHHHHHH

SEQ ID NO: 181 - protein, 140 aa, Artificial Sequence
  IL13Ra2, ligand, US20180265844, B082
HHHHHHGPVPPSTALRYLIEELVNITQNQKAPLCNGSMVWSINLTAGMYCAALESLINVSGCSAIEKTQRMLSGFCPHKVSAGQFSSLHVRDTKIEVAQFVKDLLLHLKKLFREGRFNGGGGSGHNYTTRNILPGLNITS

SEQ ID NO: 182 - protein, 237 aa, Artificial Sequence
  E200+EPHA2 binder , WO2007073499, B083-1_LC
GHNYTTRNILPGLNITSDIQLTQSPSSLSASVGDRVTITCKASQDINNYLSWYQQKPGQAPRLLIYRANRLVDGVPDRFSGSGYGTDFTLTINNIESEDAAYYFCLKYDVFPYTFGQGTKVEIKRTVAAPSVFIFPPSDEQLKSGTASVVCLLNNFYPREAKVQWKVDNALQSGNSQESVTEQDSKDSTYSLSSTLTLSKADYEKHKVYACEVTHQGLSSPVTKSFNRGECHHHHHH

SEQ ID NO: 183 - protein, 223 aa, Artificial Sequence
  EPHA2, WO2007073499, B083-2_HC
QVQLLESGGGLVQPGGSLRLSCAASGFTFSSYTMSWVRQAPGQALEWMGTISSGGTYTYYPDSVKGRFTISRDNAKNSLYLQMNSLRAEDTAVYYCAREAIFTYWGRGTLVTSSASTKGPSVFPLAPSSKSTSGGTAALGCLVKDYFPEPVTVSWNSGALTSGVHTFPAVLQSSGLYSLSSVVTVPSSSLGTQTYICNVNHKPSNTKVDKKVEPKSCHHHHHH

SEQ ID NO: 184 - protein, 237 aa, Artificial Sequence
  E200+EGFRvIII binder , WO2013185010, B084-1_LC
GHNYTTRNILPGLNITSDIQMTQSPSSLSASVGDRVTITCRASQGIRNNLAWYQQKPGKAPKRLIYAASNLQSGVPSRFTGSGSGTEFTLIVSSLQPEDFATYYCLQHHSYPLTSGGGTKVEIKRTVAAPSVFIFPPSDEQLKSGTASVVCLLNNFYPREAKVQWKVDNALQSGNSQESVTEQDSKDSTYSLSSTLTLSKADYEKHKVYACEVTHQGLSSPVTKSFNRGECHHHHHH

SEQ ID NO: 185 - protein, 225 aa, Artificial Sequence
  EGFRvIII, WO2013185010, B084-2_HC
EVQVLESGGGLVQPGGSLRLSCAASGFTFSSYAMSWVRQAPGKGLEWVSAISGSGGSTNYADSVKGRFTISRDNSKNTLYLQMNSLRAEDTAVYYCAGSSGWSEYWGQGTLVTVSSASTKGPSVFPLAPSSKSTSGGTAALGCLVKDYFPEPVTVSWNSGALTSGVHTFPAVLQSSGLYSLSSVVTVPSSSLGTQTYICNVNHKPSNTKVDKKVEPKSCHHHHHH

SEQ ID NO: 186 - protein, 237 aa, Artificial Sequence
  E200+PSMA binder , US20190300622, B085-1_LC
GHNYTTRNILPGLNITSDIVMTQSPSSLSASVGDRVTITCKASQDVGTAVDWYQQKPGKAPKLLIYWASTRHTGVPDRFTGSGSGTDFTLTISSLQPEDFADYFCQQYNSYPLTFGGGTKLEIKRTVAAPSVFIFPPSDEQLKSGTASVVCLLNNFYPREAKVQWKVDNALQSGNSQESVTEQDSKDSTYSLSSTLTLSKADYEKHKVYACEVTHQGLSSPVTKSFNRGECHHHHHH

SEQ ID NO: 187 - protein, 224 aa, Artificial Sequence
  PSMA, US20190300622, B085-2_HC
EVQLVQSGAEVKKPGASVKISCKTSGYTFTEYTIHWVKQASGKGLEWIGNINPNNGGTTYNQKFEDRATLTVDKSTSTAYMELSSLRSEDTAVYYCAAGWNFDYWGQGTTVTVSSASTKGPSVFPLAPSSKSTSGGTAALGCLVKDYFPEPVTVSWNSGALTSGVHTFPAVLQSSGLYSLSSVVTVPSSSLGTQTYICNVNHKPSNTKVDKKVEPKSCHHHHHH

SEQ ID NO: 188 - protein, 240 aa, Artificial Sequence
  E200+CEA binder , WO1999043817, B086-1_LC
GHNYTTRNILPGLNITSDIVLTQSPASLTVSLGLRATISCRASKSVSASGYSYMHWYQQRPGQPPKLLIYLASNLQSGVPARFSGSGSGTDFTLNIHPVEEEDAATYYCQHSRELPTFGGGTKLEIKRTVAAPSVFIFPPSDEQLKSGTASVVCLLNNFYPREAKVQWKVDNALQSGNSQESVTEQDSKDSTYSLSSTLTLSKADYEKHKVYACEVTHQGLSSPVTKSFNRGECHHHHHH

SEQ ID NO: 189 - protein, 233 aa, Artificial Sequence
  CEA, WO1999043817, B086-2_HC
EVQLQQSGAELVRSGASVKMSCTASGFNIKDYYMHWVKQRPEQGLEWIGWIDPENGDTEYAPKFQGKATMTTDYSSNTAYLQLSSLTSEDTAVYYCNTRGLSTMITTRWFFDVWGAGTTVAVSSASTKGPSVFPLAPSSKSTSGGTAALGCLVKDYFPEPVTVSWNSGALTSGVHTFPAVLQSSGLYSLSSVVTVPSSSLGTQTYICNVNHKPSNTKVDKKVEPKSCHHHHHH

SEQ ID NO: 190 - protein, 236 aa, Artificial Sequence
  E200+PSCA binder , US20120077962, B087-1_LC
GHNYTTRNILPGLNITSDIQLTQSPSSLSASVGDRVTITCSASSSVRFIHWYQQKPGKAPKRLIYDTSKLASGVPSRFSGSGSGTDFTLTISSLQPEDFATYYCQQWSSSPFTFGQGTKVEIKRTVAAPSVFIFPPSDEQLKSGTASVVCLLNNFYPREAKVQWKVDNALQSGNSQESVTEQDSKDSTYSLSSTLTLSKADYEKHKVYACEVTHQGLSSPVTKSFNRGECHHHHHH

SEQ ID NO: 191 - protein, 221 aa, Artificial Sequence
  PSCA, US20120077962, B087-2_HC
EVQLVESGGGLVQPGGSLRLSCAASGFNIKDYYIHWVRQAPGKGLEWVAWIDPENGDTEFADSVKGRFTISADTSKNTAYLQMNSLRAEDTAVYYCKTGGFWGQGTLVTVSSASTKGPSVFPLAPSSKSTSGGTAALGCLVKDYFPEPVTVSWNSGALTSGVHTFPAVLQSSGLYSLSSVVTVPSSSLGTQTYICNVNHKPSNTKVDKKVEPKSCHHHHHH

SEQ ID NO: 192 - protein, 243 aa, Artificial Sequence
  E200+Lewis Y binder , EP0749482, B088-1_LC
GHNYTTRNILPGLNITSDIQMTQSPSSLSASVGDRVTITCRSSQRIVHSNGNTYLEWYQQTPGKAPKLLIYKVSNRFSGVPSRFSGSGSGTDFTFTISSLQPEDIATYYCFQGSHVPFTFGQGTKLQITKRTVAAPSVFIFPPSDEQLKSGTASVVCLLNNFYPREAKVQWKVDNALQSGNSQESVTEQDSKDSTYSLSSTLTLSKADYEKHKVYACEVTHQGLSSPVTKSFNRGECHHHHHH

SEQ ID NO: 193 - protein, 228 aa, Artificial Sequence
  Lewis Y, EP0749482, B088-2_HC
EVQLVESGGGVVQPGRSLRLSCSSSGFTFSDYYMYWVRQAPGKGLEWVAYMSNVGAITDYPDTVKGRFTISRDNSKNTLFLQMDSLRPEDTGVYFCARGTRDGSWFAYWGQGTPVTVSSASTKGPSVFPLAPSSKSTSGGTAALGCLVKDYFPEPVTVSWNSGALTSGVHTFPAVLQSSGLYSLSSVVTVPSSSLGTQTYICNVNHKPSNTKVDKKVEPKSCHHHHHH

SEQ ID NO: 194 - protein, 237 aa, Artificial Sequence
  E200+CD171_L1CAM binder , WO2008151819, B089-1_LC
GHNYTTRNILPGLNITSDIQMTQSPSSLSASVGDRVTITCRASQDISNYLNWYQQKPGKAPKLLIYYTSRLHSGVPSRFSGSGSGTDYTLTISSLQPEDFATYFCQQGNTLPWTFGGGTKLEIKRTVAAPSVFIFPPSDEQLKSGTASVVCLLNNFYPREAKVQWKVDNALQSGNSQESVTEQDSKDSTYSLSSTLTLSKADYEKHKVYACEVTHQGLSSPVTKSFNRGECHHHHHH

SEQ ID NO: 195 - protein, 226 aa, Artificial Sequence
  CD171_L1CAM, WO2008151819, B089-2_HC
EVQLVQSGGGLVQSGGSLRLSCRASGYTFTRYWMLWVRQRPGHGLEWVGEINPRNDRTNYNEKFKTRFTISVDRSKSTAYLQMDSLRAEDTAVYFCALGGGYAMDYWGQGTLVTVSSASTKGPSVFPLAPSSKSTSGGTAALGCLVKDYFPEPVTVSWNSGALTSGVHTFPAVLQSSGLYSLSSVVTVPSSSLGTQTYICNVNHKPSNTKVDKKVEPKSCHHHHHH

SEQ ID NO: 196 - protein, 239 aa, Artificial Sequence
  E200+ EpCAM binder , WO2010142990A1, B090-1_LC
GHNYTTRNILPGLNITSEIVMTQSPATLSVSPGERATLSCRASQSVSSNLAWYQQKPGQAPRLIIYGASTTASGIPARFSASGSGTDFTLTISSLQSEDFAVYYCQQYNNWPPAYTFGQGTKLEIKRTVAAPSVFIFPPSDEQLKSGTASVVCLLNNFYPREAKVQWKVDNALQSGNSQESVTEQDSKDSTYSLSSTLTLSKADYEKHKVYACEVTHQGLSSPVTKSFNRGECHHHHHH

SEQ ID NO: 197 - protein, 224 aa, Artificial Sequence
  EpCAM, WO2010142990A1, B090-2_HC
QVQLVQSGAEVKKPGSSVKVSCKASGGTFSSYAISWVRQAPGQGLEWMGGIIPIFGTANYAQKFQGRVTITADESTSTAYMELSSLRSEDTAVYYCARGLLWNYWGQGTLVTVSSASTKGPSVFPLAPSSKSTSGGTAALGCLVKDYFPEPVTVSWNSGALTSGVHTFPAVLQSSGLYSLSSVVTVPSSSLGTQTYICNVNHKPSNTKVDKKVEPKSCHHHHHH

SEQ ID NO: 198 - protein, 240 aa, Artificial Sequence
  E200+ ALK binder , WO2015069922A2, B091-1_LC
GHNYTTRNILPGLNITSEIVLTQSPATLSLSPGERATLSCRASESVDNYGISFAWYQQKPGQAPRLLIYRASRATGIPARFSGSGSGTDFTLTISSLEPEDFAVYYCQQNNKDPPTFFGQGTKLEIKRTVAAPSVFIFPPSDEQLKSGTASVVCLLNNFYPREAKVQWKVDNALQSGNSQESVTEQDSKDSTYSLSSTLTLSKADYEKHKVYACEVTHQGLSSPVTKSFNRGECHHHHHH

SEQ ID NO: 199 - protein, 230 aa, Artificial Sequence
  ALK, WO2015069922A2, B091-2_HC
QVQLQQSGAEVKKPGSSVKVSCKASGYAFSSYISWVRQAPGQGLEWMGGQIYPGDGDTNYAQKFQGRVTITADESTSTAYMELSSLRSEDTAVYYCVRYYYGSSGYFDYWWGQGTMVTVSSASTKGPSVFPLAPSSKSTSGGTAALGCLVKDYFPEPVTVSWNSGALTSGVHTFPAVLQSSGLYSLSSVVTVPSSSLGTQTYICNVNHKPSNTKVDKKVEPKSCHHHHHH

SEQ ID NO: 200 - protein, 242 aa, Artificial Sequence
  E200+ IGF-1R binder , US7985842B2, B092-1_LC
GHNYTTRNILPGLNITSDVVMTQTPLSLPVSLGDPASISCRSSQSIVHSNVNTYLEWYLQKPGQSPRLLIYKVSNRFSGVPDRFSGSGAGTDFTLRISRVEAEDLGIYYCFQGSHVPPTFGGGTKLEIKRTVAAPSVFIFPPSDEQLKSGTASVVCLLNNFYPREAKVQWKVDNALQSGNSQESVTEQDSKDSTYSLSSTLTLSKADYEKHKVYACEVTHQGLSSPVTKSFNRGECHHHHHH

SEQ ID NO: 201 - protein, 233 aa, Artificial Sequence
  IGF-1R, US7985842B2, B092-2_HC
QVQLVQSGAEVVKPGASVKLSCKASGYTFTSYWMHWVKQRPGQGLEWIGEINPSNGRTNYNQKFQGKATLTVDKSSSTAYMQLSSLTSEDSAVYYFARGRPDYYGSSKWYFDVWGQGTTVTVSSASTKGPSVFPLAPSSKSTSGGTAALGCLVKDYFPEPVTVSWNSGALTSGVHTFPAVLQSSGLYSLSSVVTVPSSSLGTQTYICNVNHKPSNTKVDKKVEPKSCHHHHHH

SEQ ID NO: 202 - protein, 237 aa, Artificial Sequence
  E200+ Nectin 4 binder , US20210130459, B093-1_LC
GHNYTTRNILPGLNITSSIVMTQTPKFLLVSAGDRVTITCKASQSVSNDVAWYQQKPGQSPKLLIYYASNRYTGVPDRFTGSGYGTDFTFTISAVQAEDLAVYFCQQDYSSPYTFGGGTKLEIKRTVAAPSVFIFPPSDEQLKSGTASVVCLLNNFYPREAKVQWKVDNALQSGNSQESVTEQDSKDSTYSLSSTLTLSKADYEKHKVYACEVTHQGLSSPVTKSFNRGECHHHHHH

SEQ ID NO: 203 - protein, 226 aa, Artificial Sequence
  Nectin 4, US20210130459, B093-2_HC
QVQLQQSGPELVKPGASVRISCKASGYTFTTYYIHWVKQRPGQGLEWIGWIYPGNVNTKNNEKFKVKATLTADKSSSTAYMQLSSLTSEDSAVYFCARSNPYVMDYWGQGTSVTVSSASTKGPSVFPLAPSSKSTSGGTAALGCLVKDYFPEPVTVSWNSGALTSGVHTFPAVLQSSGLYSLSSVVTVPSSSLGTQTYICNVNHKPSNTKVDKKVEPKSCHHHHHH

SEQ ID NO: 204 - protein, 238 aa, Artificial Sequence
  E200+ FAP binder , EP2603530, B094-1_LC
GHNYTTRNILPGLNITSEIVLTQSPGTLSLSPGERATLSCRASQSVTSSYLAWYQQKPGQAPRLLINVGSRRATGIPDRFSGSGSGTDFTLTISRLEPEDFAVYYCQQGIMLPPTFGQGTKVEIKRTVAAPSVFIFPPSDEQLKSGTASVVCLLNNFYPREAKVQWKVDNALQSGNSQESVTEQDSKDSTYSLSSTLTLSKADYEKHKVYACEVTHQGLSSPVTKSFNRGECHHHHHH

SEQ ID NO: 205 - protein, 226 aa, Artificial Sequence
  FAP, EP2603530, B094-2_HC
EVQLLESGGGLVQPGGSLRLSCAASGFTFSSYAMSWVRQAPGKGLEWVSAIIGSGSITYYADSVKGRFTISRDNSKNTLYLQMNSLRAEDTAVYYCAKGWFGGFNYWGQGTLVTVSSASTKGPSVFPLAPSSKSTSGGTAALGCLVKDYFPEPVTVSWNSGALTSGVHTFPAVLQSSGLYSLSSVVTVPSSSLGTQTYICNVNHKPSNTKVDKKVEPKSCHHHHHH

SEQ ID NO: 206 - protein, 244 aa, Artificial Sequence
  E200+ AXL binder , EP2431393, B095-1_LC
GHNYTTRNILPGLNITSDVVMTQSPLSLPVTLGQPASISCRSSQNIVHTNGNTYLEWYQQKPGKAPELLIYKVSNRFSGVPDRFSGSGSGTDFTLKISRVEAEDVGVYYCFQGSHLLEPFTFGQGTKLEIKRTVAAPSVFIFPPSDEQLKSGTASVVCLLNNFYPREAKVQWKVDNALQSGNSQESVTEQDSKDSTYSLSSTLTLSKADYEKHKVYACEVTHQGLSSPVTKSFNRGECHHHHHH

SEQ ID NO: 207 - protein, 228 aa, Artificial Sequence
  AXL, EP2431393, B095-2_HC
QVTLKESGPVLVKPTETLTLTCTVSGFSLSSFGVDWVRQAPGKGLEWMGVIWGGGSTNYNSALKSRLTISKDNSKSQVVLTMTNMDPVDTATYYCAGEGSKYGAWFAYWGQGTLVTVSSASTKGPSVFPLAPSSKSTSGGTAALGCLVKDYFPEPVTVSWNSGALTSGVHTFPAVLQSSGLYSLSSVVTVPSSSLGTQTYICNVNHKPSNTKVDKKVEPKSCHHHHHH

SEQ ID NO: 208 - protein, 237 aa, Artificial Sequence
  E200+ CD138 binder , US20090175863, B096-1_LC
GHNYTTRNILPGLNITSDIQMTQSTSSLSASLGDRVTISCSASQGINNYLNWYQQKPDGTVELLIYYTSTLQSGVPSRFSGSGSGTDYSLTISNLEPEDIGTYYCQQYSKLPRTFGGGTKLEIKRTVAAPSVFIFPPSDEQLKSGTASVVCLLNNFYPREAKVQWKVDNALQSGNSQESVTEQDSKDSTYSLSSTLTLSKADYEKHKVYACEVTHQGLSSPVTKSFNRGECHHHHHH

SEQ ID NO: 209 - protein, 231 aa, Artificial Sequence
  CD138, US20090175863, B096-2_HC
QVQLQQSGSELMMPGASVKISCKATGYTFSNYWIEWVKQRPGHGLEWIGEILPGTGRTIYNEKFKGKATFTADISSNTVQMQLSSLTSEDSAVYYCARRDYYGNFYYAMDYWGQGTSVTVSSASTKGPSVFPLAPSSKSTSGGTAALGCLVKDYFPEPVTVSWNSGALTSGVHTFPAVLQSSGLYSLSSVVTVPSSSLGTQTYICNVNHKPSNTKVDKKVEPKSCHHHHHH

SEQ ID NO: 210 - protein, 237 aa, Artificial Sequence
  E200+ CLDN6 binder , WO2019056023, B097-1_LC
GHNYTTRNILPGLNITSDIQMTQSPSSLSASVGDRVTITCRISENIYSYLAWYQQKPGKAPKLLIYNAKILVEGVPSRFSGSGSGTDFTLTISSLQPEDFATYYCQHHYTVPWTFGQGTKLEIKRTVAAPSVFIFPPSDEQLKSGTASVVCLLNNFYPREAKVQWKVDNALQSGNSQESVTEQDSKDSTYSLSSTLTLSKADYEKHKVYACEVTHQGLSSPVTKSFNRGECHHHHHH

SEQ ID NO: 211 - protein, 226 aa, Artificial Sequence
  CLDN6, WO2019056023, B097-2_HC
EVQLLESGGGLVQPGGSMRLSCAASGFTFSNYWMNWVRQAPGKGLEWVAQIRLKSDNYATHYADSVKGRFTISRDDSKNTVYLQMNSLRAEDTGVYYCNDGPPSGYWGQGTLLTVSSASTKGPSVFPLAPSSKSTSGGTAALGCLVKDYFPEPVTVSWNSGALTSGVHTFPAVLQSSGLYSLSSVVTVPSSSLGTQTYICNVNHKPSNTKVDKKVEPKSCHHHHHH

SEQ ID NO: 212 - protein, 242 aa, Artificial Sequence
  E200+ Her4 binder , WO2021116119, B098-1_LC
GHNYTTRNILPGLNITSQSVLTQPASVSGSPGQSITISCAGTSSDVGGSSYVSWYQQHPGKAPKLMIYYDSYRPSGVSNRFSGSKSGNTASLTISGLQAEDEADYYCSSNTYYSTRVFGGGTKLAVLGKRTVAAPSVFIFPPSDEQLKSGTASVVCLLNNFYPREAKVQWKVDNALQSGNSQESVTEQDSKDSTYSLSSTLTLSKADYEKHKVYACEVTHQGLSSPVTKSFNRGECHHHHHH

SEQ ID NO: 213 - protein, 230 aa, Artificial Sequence
  Her4, WO2021116119, B098-2_HC
EVQLVESGGSLVKPGGSLRLSCAASGFTFSNYYMNWVRQAPGKGLEWISSIDGSSRYIDYADFVKGRFTISRDNATNSLYLQMNSLRAEDTAVYYCVRSSSDYFGGGMDVWGRGTLVTVSSASTKGPSVFPLAPSSKSTSGGTAALGCLVKDYFPEPVTVSWNSGALTSGVHTFPAVLQSSGLYSLSSVVTVPSSSLGTQTYICNVNHKPSNTKVDKKVEPKSCHHHHHH

SEQ ID NO: 214 - protein, 243 aa, Artificial Sequence
  E200+ Claudin 18.2 binder , SG10201609510U, B099-1_LC
GHNYTTRNILPGLNITSDIVMTQSPSSLTVTAGEKVTMSCKSSQSLLNSGNQKNYLTWYQQKPGQPPKLLIYWASTRESGVPDRFTGSGSGTDFTLTISSVQAEDLAVYYCQNDYSYPFTFGSGTKLEIKRTVAAPSVFIFPPSDEQLKSGTASVVCLLNNFYPREAKVQWKVDNALQSGNSQESVTEQDSKDSTYSLSSTLTLSKADYEKHKVYACEVTHQGLSSPVTKSFNRGECHHHHHH

SEQ ID NO: 215 - protein, 227 aa, Artificial Sequence
  Claudin 18.2, SG10201609510U, B099-2_HC
QVQLQQPGAELVRPGASVKLSCKASGYTFTSYWINWVKQRPGQGLEWIGNIYPSDSYTNYNQKFKDKATLTVDKSSSTAYMQLSSPTSEDSAVYYCTRSWRGNSFDYWGQGTTLTVSSASTKGPSVFPLAPSSKSTSGGTAALGCLVKDYFPEPVTVSWNSGALTSGVHTFPAVLQSSGLYSLSSVVTVPSSSLGTQTYICNVNHKPSNTKVDKKVEPKSCHHHHHH

SEQ ID NO: 216 - protein, 242 aa, Artificial Sequence
  E200+ O-acetylated GD2 binder , EP3269739A1, B100-1_LC
GHNYTTRNILPGLNITSDVVMTQSPLSLPVTLGQPASISCRSSQSLLKNNGNTFLHWYQQRPGQSPRLLIYKVSNRLSGVPDRFSGSGSGTDFTLKISRVEAEDVGVYFCSQSTHIPYTFGGGTKVEIKRTVAAPSVFIFPPSDEQLKSGTASVVCLLNNFYPREAKVQWKVDNALQSGNSQESVTEQDSKDSTYSLSSTLTLSKADYEKHKVYACEVTHQGLSSPVTKSFNRGECHHHHHH

SEQ ID NO: 217 - protein, 228 aa, Artificial Sequence
  O-acetylated GD2, EP3269739A1, B100-2_HC
EVQLVESGGGLVQPGRSLRLSCTTSEFTFTDYYMTWVRQAPGKGLEWLGFIRNRANGYTTEYNPSVKGRFTISRDNSKSILYLQMNSLKTEDTAVYYCARVSNWAFDYWGQGTLVTVSSASTKGPSVFPLAPSSKSTSGGTAALGCLVKDYFPEPVTVSWNSGALTSGVHTFPAVLQSSGLYSLSSVVTVPSSSLGTQTYICNVNHKPSNTKVDKKVEPKSCHHHHHH

SEQ ID NO: 218 - protein, 237 aa, Artificial Sequence
  E200+ GD3 binder , US7253263, B101-1_LC
GHNYTTRNILPGLNITSDIQMTQSPSSLSASVGDRVTITCSASQDISNYLNWYQQKPDKAVKLLIFYSSNLHSGVPSRFSGGGSGTDYTLTISSLQPEDIATYFCHQYSKLPWTFGQGTKVEIKRTVAAPSVFIFPPSDEQLKSGTASVVCLLNNFYPREAKVQWKVDNALQSGNSQESVTEQDSKDSTYSLSSTLTLSKADYEKHKVYACEVTHQGLSSPVTKSFNRGECHHHHHH

SEQ ID NO: 219 - protein, 228 aa, Artificial Sequence
  GD3, US7253263, B101-2_HC
EVQLVESGGDFVQPGGSLRVSCAASGFAFSHYAMSWVRQAPGKGLEWVAYISSGGSGTYYSDSVKGRFTISRDNSKNTLYLQMRSLRAEDSAVYFCTRVKLGTYYFDSWGQGTLLTVSSASTKGPSVFPLAPSSKSTSGGTAALGCLVKDYFPEPVTVSWNSGALTSGVHTFPAVLQSSGLYSLSSVVTVPSSSLGTQTYICNVNHKPSNTKVDKKVEPKSCHHHHHH

SEQ ID NO: 220 - protein, 236 aa, Artificial Sequence
  E200+ GM2 binder , US5939532, B102-1_LC
GHNYTTRNILPGLNITSDIQLTQSPSSLSASPGDRVTITCSASSSVSYMHWFQQKPGKAPKLWIYSTSNLASGVPSRFSGSGSGTSYSLTISRLQPEDIATYYCQQRSSYPYTFGGGTKVEIKRTVAAPSVFIFPPSDEQLKSGTASVVCLLNNFYPREAKVQWKVDNALQSGNSQESVTEQDSKDSTYSLSSTLTLSKADYEKHKVYACEVTHQGLSSPVTKSFNRGECHHHHHH

SEQ ID NO: 221 - protein, 229 aa, Artificial Sequence
  GM2, US5939532, B102-2_HC
EVQLVQSGAEVKKPGASVKVSCKASGYTFTDYNMDWVRQAPGQGLEWMGYIYPNNGGTGYNQKFKSKVTITVDTSTSTAYMELHSLRSEDTAVYYCATYGHYYGYMFAYWGQGTLVTVSSASTKGPSVFPLAPSSKSTSGGTAALGCLVKDYFPEPVTVSWNSGALTSGVHTFPAVLQSSGLYSLSSVVTVPSSSLGTQTYICNVNHKPSNTKVDKKVEPKSCHHHHHH

SEQ ID NO: 222 - protein, 242 aa, Artificial Sequence
  E200+ TM4SF1 binder , WO2015054427A1, B103-1_LC
GHNYTTRNILPGLNITSAVVMTQTPLSLPVSLGDQASISCRSSQSLVHSNGNTYLHWYMQKPGQSPKVLIYKVSNRFSGVPDRFSGSGSGTDFTLKISRVEADDLGIYFCSQSTHIPLAFGAGTKLELKRTVAAPSVFIFPPSDEQLKSGTASVVCLLNNFYPREAKVQWKVDNALQSGNSQESVTEQDSKDSTYSLSSTLTLSKADYEKHKVYACEVTHQGLSSPVTKSFNRGECHHHHHH

SEQ ID NO: 223 - protein, 232 aa, Artificial Sequence
  TM4SF1, WO2015054427A1, B103-2_HC
EVILVESGGGLVKPGGSLKLSCAASGFTFSSFAMSWVRQTPEKRLEWVATISSGSIYIYYTDGVKGRFTISRDNAKNTVHLQMSSLRSEDTAMYYCARRGIYYGYDGYAMDYWGQGTSVTVSSASTKGPSVFPLAPSSKSTSGGTAALGCLVKDYFPEPVTVSWNSGALTSGVHTFPAVLQSSGLYSLSSVVTVPSSSLGTQTYICNVNHKPSNTKVDKKVEPKSCHHHHHH

SEQ ID NO: 224 - protein, 237 aa, Artificial Sequence
  E200+ CD147 binder , WO2017186182, B104-1_LC
GHNYTTRNILPGLNITSDIQMTQSPSTLSASVGDRVTLSCKASENVGTYVSWYQQKPGKAPKLLIYGASNRYTGVPSRFTGSGSGTDFTLTISSLQPEDFATYYCGQSYSYPFTFGSGTKLEIKRTVAAPSVFIFPPSDEQLKSGTASVVCLLNNFYPREAKVQWKVDNALQSGNSQESVTEQDSKDSTYSLSSTLTLSKADYEKHKVYACEVTHQGLSSPVTKSFNRGECHHHHHH

SEQ ID NO: 225 - protein, 225 aa, Artificial Sequence
  CD147, WO2017186182, B104-2_HC
EVQLVESGGGLVQPGGSLRLSCAASGFTFSNFWMNWVRQAPGKGLEWVSEIRLKSNNYATHYAESVKGRFTISRDDSKNTLYLQMNSLKTEDTAVYYCTSYDYEYWGQGTLVTVSAASTKGPSVFPLAPSSKSTSGGTAALGCLVKDYFPEPVTVSWNSGALTSGVHTFPAVLQSSGLYSLSSVVTVPSSSLGTQTYICNVNHKPSNTKVDKKVEPKSCHHHHHH

SEQ ID NO: 226 - protein, 236 aa, Artificial Sequence
  E200+ CEACAM5 binder , WO2015069430, B105-1_LC
GHNYTTRNILPGLNITSDIQLTQSPSSLSASVGDRVTITCKASQDVGTSVAWYQQKPGKAPKLLIYWTSTRHTGVPSRFSGSGSGTDFTFTISSLQPEDIATYYCQQYSLYRSFGQGTKVEIKRTVAAPSVFIFPPSDEQLKSGTASVVCLLNNFYPREAKVQWKVDNALQSGNSQESVTEQDSKDSTYSLSSTLTLSKADYEKHKVYACEVTHQGLSSPVTKSFNRGECHHHHHH

SEQ ID NO: 227 - protein, 228 aa, Artificial Sequence
  CEACAM5, WO2015069430, B105-2_HC
EVQLVESGGGVVQPGRSLRLSCSASGFDFTTYWMSWVRQAPGKGLEWIGEIHPDSSTINYAPSLKDRFTISRDNAKNTLFLQMDSLRPEDTGVYFCASLYFGFPWFAYWGQGTPVTVSSASTKGPSVFPLAPSSKSTSGGTAALGCLVKDYFPEPVTVSWNSGALTSGVHTFPAVLQSSGLYSLSSVVTVPSSSLGTQTYICNVNHKPSNTKVDKKVEPKSCHHHHHH

SEQ ID NO: 228 - protein, 234 aa, Artificial Sequence
  E200+ VEGFR-1 binder , US7615214, B106-1_LC
GHNYTTRNILPGLNITSDIVMTQSPDSLAVSLGERATINCSASSSVSYMHWYQQKPGQPPKLLIYRTSNLASGVPDRFSGSGSGTDFTLTISSLQAEDVAVYYCHQWSMYTFGQGTKVEIKRTVAAPSVFIFPPSDEQLKSGTASVVCLLNNFYPREAKVQWKVDNALQSGNSQESVTEQDSKDSTYSLSSTLTLSKADYEKHKVYACEVTHQGLSSPVTKSFNRGECHHHHHH

SEQ ID NO: 229 - protein, 226 aa, Artificial Sequence
  VEGFR-1, US7615214, B106-2_HC
QVQLVQSGAEVKKPGASVKVSCKASGYTFINYNMHWVRQAPGQGLEWMGAIFPGNGFTSYNQKFKGRVTITVDKSTSTAYMELSSLRSEDTAVYYCARDGDYYFDYWGQGTLVTVSSASTKGPSVFPLAPSSKSTSGGTAALGCLVKDYFPEPVTVSWNSGALTSGVHTFPAVLQSSGLYSLSSVVTVPSSSLGTQTYICNVNHKPSNTKVDKKVEPKSCHHHHHH

SEQ ID NO: 230 - protein, 243 aa, Artificial Sequence
  E200+ PDPN binder , US20160347834A1, B107-1_LC
GHNYTTRNILPGLNITSDVLMTQTPLSLPVSLGDQASISCRSSRNIVQSTGNTYLEWYLQKPGQSPKLLIFKVSNRFSGVPDRFSGSGSGTDFTLKISRVEAEDLGVYYCFQGSHVPPWTFGGGTKLEIKRTVAAPSVFIFPPSDEQLKSGTASVVCLLNNFYPREAKVQWKVDNALQSGNSQESVTEQDSKDSTYSLSSTLTLSKADYEKHKVYACEVTHQGLSSPVTKSFNRGECHHHHHH

SEQ ID NO: 231 - protein, 228 aa, Artificial Sequence
  PDPN, US20160347834A1, B107-2_HC
DVQLVESGGGLVQPGGSRKLSCAASGFTFSGFGMHWVRQAPEKGLEWVAYISSVSSRIYYADTVKGRFTISRDNPKNTLFLQMTSLRSEDTAMYYCAREQTGPAWFAYWGQGTLVTVSAASTKGPSVFPLAPSSKSTSGGTAALGCLVKDYFPEPVTVSWNSGALTSGVHTFPAVLQSSGLYSLSSVVTVPSSSLGTQTYICNVNHKPSNTKVDKKVEPKSCHHHHHH

SEQ ID NO: 232 - protein, 243 aa, Artificial Sequence
  E200+ WT1 binder , EP2694553A2, B108-1_LC
GHNYTTRNILPGLNITSQTWTQPPSASGTPGQRVTISCSGSSSNIGSNYVYWYQQLPGTAPKLVLLIYRSNQRPSGVPDRFSGSKSGTSASLAISGPRSVDEADYYCAAWDDSLNGVVFGGGTKLTVLGKRTVAAPSVFIFPPSDEQLKSGTASVVCLLNNFYPREAKVQWKVDNALQSGNSQESVTEQDSKDSTYSLSSTLTLSKADYEKHKVYACEVTHQGLSSPVTKSFNRGECHHHHHH

SEQ ID NO: 233 - protein, 230 aa, Artificial Sequence
  WT1, EP2694553A2, B108-2_HC
QVQLVQSGAEVKKPGSSVKVSCKASGGTFSSYAISWVRQAPGQGLEVHWMGGIIPIFGTANYAQKFQGRVTITADESTSTAYMELSSLRSEDTAVYYCARRIPPYYGMDVWGQGTTVTVSSASTKGPSVFPLAPSSKSTSGGTAALGCLVKDYFPEPVTVSWNSGALTSGVHTFPAVLQSSGLYSLSSVVTVPSSSLGTQTYICNVNHKPSNTKVDKKVEPKSCHHHHHH

SEQ ID NO: 234 - protein, 236 aa, Artificial Sequence
  E200+ GPC2 binder , WO2020033430, B109-1_LC
GHNYTTRNILPGLNITSENVLTQSPAIMSASLGEKVTMSCRASSSVNYIYWYQQKSDASPKLWIYYTSNLAPGVPARFSGSGSGNSYSLTISSMEGEDAATYYCQQFSSSPSTFGTGTKLELKRTVAAPSVFIFPPSDEQLKSGTASVVCLLNNFYPREAKVQWKVDNALQSGNSQESVTEQDSKDSTYSLSSTLTLSKADYEKHKVYACEVTHQGLSSPVTKSFNRGECHHHHHH

SEQ ID NO: 235 - protein, 232 aa, Artificial Sequence
  GPC2, WO2020033430, B109-2_HC
EVQLQQSGPELVKPGASVKMSCKASRFTFTDYNIHWVKQSPGKTLEWIGYINPNNGDIFYKQKFNGKATLTINKSSNTAYMELRSLTSEDSAVYYCVRSSNIRYTFDRFFDVWGTGTTVTVSSASTKGPSVFPLAPSSKSTSGGTAALGCLVKDYFPEPVTVSWNSGALTSGVHTFPAVLQSSGLYSLSSVVTVPSSSLGTQTYICNVNHKPSNTKVDKKVEPKSCHHHHHH

SEQ ID NO: 236 - protein, 237 aa, Artificial Sequence
  E200+ FGFR4 binder , WO2019034427A1, B110-1_LC
GHNYTTRNILPGLNITSDIQMTQSPSSLSASVGDRVTITCRASESVSTLMHWYQQKPGKAPKLLIYGTSNLESGVPSRFSGSGSGTDFTLTISSLQPEDFATYYCQQSWNDPPTFGGGTKVEIKRTVAAPSVFIFPPSDEQLKSGTASVVCLLNNFYPREAKVQWKVDNALQSGNSQESVTEQDSKDSTYSLSSTLTLSKADYEKHKVYACEVTHQGLSSPVTKSFNRGECHHHHHH

SEQ ID NO: 237 - protein, 227 aa, Artificial Sequence
  FGFR4, WO2019034427A1, B110-2_HC
EVQLVESGGGLVQPGGSLRLSCAASGFTFSNYYMSWVRQAPGKGLEWVATINPSGTRTYYPDSVKGRFTISRDNAKNSLYLQMNSLRAEDTAVYYCARLYNNYAFDYWGQGTLVTVSSASTKGPSVFPLAPSSKSTSGGTAALGCLVKDYFPEPVTVSWNSGALTSGVHTFPAVLQSSGLYSLSSVVTVPSSSLGTQTYICNVNHKPSNTKVDKKVEPKSCHHHHHH

SEQ ID NO: 238 - protein, 237 aa, Artificial Sequence
  E200+ EphB4 binder , EP1973950, B111-1_LC
GHNYTTRNILPGLNITSDIQMTQSPSSLSASVGDRVTITCRASQDVSTAVAWYQQKPGKAPKLLIYSASFLYSGVPSRFSGSGSGTDFTLTISSLQPEDFATYYCQQTAQTPETFGQGTKVEIKRTVAAPSVFIFPPSDEQLKSGTASVVCLLNNFYPREAKVQWKVDNALQSGNSQESVTEQDSKDSTYSLSSTLTLSKADYEKHKVYACEVTHQGLSSPVTKSFNRGECHHHHHH

SEQ ID NO: 239 - protein, 237 aa, Artificial Sequence
  EphB4, EP1973950, B111-2_HC
EVQLVESGGGLVQPGGSLRLSCAASGFTISGYYIHWVRQAPGKGLEWVGGIYLYSGSTDYADSVKGYADSVKGRFTISADTSKNTAYLQMNSLRAEDTAVYYCARGSGLRLGGLDYAMDYWGQGTLVTASTKGPSVFPLAPSSKSTSGGTAALGCLVKDYFPEPVTVSWNSGALTSGVHTFPAVLQSSGLYSLSSVVTVPSSSLGTQTYICNVNHKPSNTKVDKKVEPKSCHHHHHH

SEQ ID NO: 240 - protein, 243 aa, Artificial Sequence
  E200+ STEAP-1 binder , WO2015112909, B112-1_LC
GHNYTTRNILPGLNITSDIQMTQSPSSLSASVGDRVTITCKSSQSLLYRSNQKNYLAWYQQKPGKAPKLLIYWASTRESGVPSRFSGSGSGTDFTLTISSLQPEDFATYYCQQYYNYPRTFGQGTKVEIKRTVAAPSVFIFPPSDEQLKSGTASVVCLLNNFYPREAKVQWKVDNALQSGNSQESVTEQDSKDSTYSLSSTLTLSKADYEKHKVYACEVTHQGLSSPVTKSFNRGECHHHHHH

SEQ ID NO: 241 - protein, 233 aa, Artificial Sequence
  STEAP-1, WO2015112909, B112-2_HC
EVQLVESGGGLVQPGGSLRLSCAVSGYSITSDYAWNWVRQAPGKGLEWVGYISNSGSTSYNPSLKSRFTISRDTSKNTLYLQMNSLRAEDTAVYYCARERNYDYDDYYYAMDYWGQGTLVTVSSASTKGPSVFPLAPSSKSTSGGTAALGCLVKDYFPEPVTVSWNSGALTSGVHTFPAVLQSSGLYSLSSVVTVPSSSLGTQTYICNVNHKPSNTKVDKKVEPKSCHHHHHH

SEQ ID NO: 242 - protein, 237 aa, Artificial Sequence
  E200+ STEAP-2 binder , US20180104357, B113-1_LC
GHNYTTRNILPGLNITSDIQMTQSPSTLSASVGDRVTITCRASQSISSWLAWYQQKPGRAPNLLISKASSLKSGVPSRFSGSGSGTEFTLTVSSLQPDDFATYYCQQYYSYSYTFGQGTKLEIKRTVAAPSVFIFPPSDEQLKSGTASVVCLLNNFYPREAKVQWKVDNALQSGNSQESVTEQDSKDSTYSLSSTLTLSKADYEKHKVYACEVTHQGLSSPVTKSFNRGECHHHHHH

SEQ ID NO: 243 - protein, 224 aa, Artificial Sequence
  STEAP-2, US20180104357, B113-2_HC
QVQLVESGGGVVQPGRSLRLSCVASGFTISSYGMNWVRQAPGKGLEWVAVISYDGGNKYSVDSVKGRFTISRDNSKNTLYLQMNSLRAEDSAVYYCARGRYFDLWGRGTLVTVSSASTKGPSVFPLAPSSKSTSGGTAALGCLVKDYFPEPVTVSWNSGALTSGVHTFPAVLQSSGLYSLSSVVTVPSSSLGTQTYICNVNHKPSNTKVDKKVEPKSCHHHHHH

SEQ ID NO: 244 - protein, 237 aa, Artificial Sequence
  E200+ IL11Ra binder , WO2018109170, B114-1_LC
GHNYTTRNILPGLNITSDIVLTQSPATLSMTPGDSVSLSCRASQSISNNLHWYQQKSHESPRLLIKYASQSISGIPSRFSGSGSGTDFTLSFNSVETEDFGVYFCQQRYSWPLTFGAGTKLEMKRTVAAPSVFIFPPSDEQLKSGTASVVCLLNNFYPREAKVQWKVDNALQSGNSQESVTEQDSKDSTYSLSSTLTLSKADYEKHKVYACEVTHQGLSSPVTKSFNRGECHHHHHH

SEQ ID NO: 245 - protein, 226 aa, Artificial Sequence
  IL11Ra, WO2018109170, B114-2_HC
QVQLQQPGAELVRPGSSVKLSCKASGYTFTNYWMHWLKQRPVQGLEWIGNIGPSDSKTHYNQKFKDKATLTVDKSSSTAYMQLNSLTSEDSAVYYCARGDYVLFTYWGQGTLVTVSAASTKGPSVFPLAPSSKSTSGGTAALGCLVKDYFPEPVTVSWNSGALTSGVHTFPAVLQSSGLYSLSSVVTVPSSSLGTQTYICNVNHKPSNTKVDKKVEPKSCHHHHHH

SEQ ID NO: 246 - protein, 237 aa, Artificial Sequence
  E200+ CD163 binder , WO2011039510A2, B115-1_LC
GHNYTTRNILPGLNITSDIVMTQSPSSLSASVGDRVTITCRASQSVSSDVAWFQQKPGKSPKPLIYYASNRYSGVPSRFSGSGSGTDFTLTISSLQAEDFAVYFCGQDYTSPRTFGGGTKLEIKRTVAAPSVFIFPPSDEQLKSGTASVVCLLNNFYPREAKVQWKVDNALQSGNSQESVTEQDSKDSTYSLSSTLTLSKADYEKHKVYACEVTHQGLSSPVTKSFNRGECHHHHHH

SEQ ID NO: 247 - protein, 225 aa, Artificial Sequence
  CD163, WO2011039510A2, B115-2_HC
QVQLQESGPGLVKPSETLSLTCTVSGYSITSDYAWNWIRQFPGNKLEWMGYITYSGSTYYNPSLKSRVTISVDTSKNQFSLKLSSVTAADTATYYCVSGTYYFDYWGQGTTLTVSSASTKGPSVFPLAPSSKSTSGGTAALGCLVKDYFPEPVTVSWNSGALTSGVHTFPAVLQSSGLYSLSSVVTVPSSSLGTQTYICNVNHKPSNTKVDKKVEPKSCHHHHHH

SEQ ID NO: 248 - protein, 167 aa, Artificial Sequence
  E200+ CLTX binder , WO2017066481A1, B116-1_LC
GHNYTTRNILPGLNITSMCMPCFTTDHQMARKCDDCCGGKGRGKCYGPQCLCRKRTVAAPSVFIFPPSDEQLKSGTASVVCLLNNFYPREAKVQWKVDNALQSGNSQESVTEQDSKDSTYSLSSTLTLSKADYEKHKVYACEVTHQGLSSPVTKSFNRGECHHHHHH

SEQ ID NO: 249 - protein, 145 aa, Artificial Sequence
  CLTX, WO2017066481A1, B116-2_HC
MCMPCFTTDHQMARKCDDCCGGKGRGKCYGPQCLCRASTKGPSVFPLAPSSKSTSGGTAALGCLVKDYFPEPVTVSWNSGALTSGVHTFPAVLQSSGLYSLSSVVTVPSSSLGTQTYICNVNHKPSNTKVDKKVEPKSCHHHHHH

SEQ ID NO: 250 - protein, 244 aa, Artificial Sequence
  E200+ CD206 binder , WO2014140376A1, B117-2_HC
GHNYTTRNILPGLNITSQVQLQESGGGLVQPGGSLRLSCAASGFSLDYYAIGWFRQAPGKEREGISCISYKGGSTTYADSVKGRFTISKDNAKNTAYLQMNSLKPEDTGIYSCAAGFVCYNYDYWGQGTQVTVSSASTKGPSVFPLAPSSKSTSGGTAALGCLVKDYFPEPVTVSWNSGALTSGVHTFPAVLQSSGLYSLSSVVTVPSSSLGTQTYICNVNHKPSNTKVDKKVEPKSCHHHHHH

SEQ ID NO: 251 - protein, 238 aa, Artificial Sequence
  E200+ IL1RAP binder , WO2017191325A9, B118-1_LC
GHNYTTRNILPGLNITSDVQMTQSPSSLSASVGDRVTITCQASQSIYSFLSWYQQKPGQAPKLLIYAASDLESGVPSRFSGSGSGTDFTLTISSLQPEDFATYYCQCNYIIDYGAFGQGTKVVIKRTVAAPSVFIFPPSDEQLKSGTASVVCLLNNFYPREAKVQWKVDNALQSGNSQESVTEQDSKDSTYSLSSTLTLSKADYEKHKVYACEVTHQGLSSPVTKSFNRGECHHHHHH

SEQ ID NO: 252 - protein, 229 aa, Artificial Sequence
  IL1RAP, WO2017191325A9, B118-2_HC
EVQLEESGGRLVQPGTSLRLSCAVSGFSLSSYDMSWVRQAPGKGLEWVSTIYIGGTTAYASWPKGRFTISKTNSKNTLYLQMNSLRAEDTAVYFCARLQGANYYNSLALWGQGTLVTVSSASTKGPSVFPLAPSSKSTSGGTAALGCLVKDYFPEPVTVSWNSGALTSGVHTFPAVLQSSGLYSLSSVVTVPSSSLGTQTYICNVNHKPSNTKVDKKVEPKSCHHHHHH

SEQ ID NO: 253 - protein, 237 aa, Artificial Sequence
  E200+ MICA binder , WO2019183551, B119-1_LC
GHNYTTRNILPGLNITSAIQLTQSPSSLSASVGDRVTITCRASQGISSALAWYQQKPGKVPKSLIYDASSLESGVPSRFSGSGSGTDFTLTISSLQPEDFATYYCQQFNSYPITFGQGTRLEIKRTVAAPSVFIFPPSDEQLKSGTASVVCLLNNFYPREAKVQWKVDNALQSGNSQESVTEQDSKDSTYSLSSTLTLSKADYEKHKVYACEVTHQGLSSPVTKSFNRGECHHHHHH

SEQ ID NO: 254 - protein, 224 aa, Artificial Sequence
  MICA, WO2019183551, B119-2_HC
QVQLVESGGGVVQPGRSLRLSCAASGFTFSNYAMHWVRQAPGEGLEWVALIWYDGSNKFYGDSVKGRFTISRDNSKNTLYLQMNSLSAEDTAVYYCAREGSGHYWGQGTLVTVSSASTKGPSVFPLAPSSKSTSGGTAALGCLVKDYFPEPVTVSWNSGALTSGVHTFPAVLQSSGLYSLSSVVTVPSSSLGTQTYICNVNHKPSNTKVDKKVEPKSCHHHHHH

SEQ ID NO: 255 - protein, 299 aa, Artificial Sequence
  E200+ MAGE-A1 binder , AU2018234830A1, B120-1_LC
GHNYTTRNILPGLNITSMKPTLISVLVIIFILRGTRAQRVTQPEKLLSVFKGAPVELKCNYSYSGSPELFWYVQYSRQRLQLLLRHISRESIKGFTADLNKGETSFHLKKPFAQEEDSAMYYCALRSGGYQKVTFGTGTKLQVIPGGGGSGGGGSGGGGSMGIRLLCRVAFCFLAVGLVDVKVTQSSRYLVKRTGEKVFLECVQDMDHENMFWYRQDPGLGLRLIYFSYDVKMKEKGDIPEGYSVSREKKERFSLILESASTNQTSMYLCASNNRDSYNSPLHFGNGTRLTVTHHHHHH

SEQ ID NO: 256 - protein, 238 aa, Artificial Sequence
  E200+ MAGE-A1 binder , AU2018234830A1, B121-1_alpha chain
GHNYTTRNILPGLNITSMKPTLISVLVIIFILRGTRAQRVTQPEKLLSVFKGAPVELKCNYSYSGSPELFWYVQYSRQRLQLLLRHISRESIKGFTADLNKGETSFHLKKPFAQEEDSAMYYCALRSGGYQKVTFGTGTKLQVIPIQNPDPAVYQLRDSKSSDKSVCLFTDFDSQTNVSQSKDSDVYITDKCVLDMRSMDFKSNSAVAWSNKSDFACANAFNNSIIPEDTFFPSPESS

SEQ ID NO: 257 - protein, 268 aa, Artificial Sequence
  MAGE-A1, AU2018234830A1, B121-2_beta chain
MGIRLLCRVAFCFLAVGLVDVKVTQSSRYLVKRTGEKVFLECVQDMDHENMFWYRQDPGLGLRLIYFSYDVKMKEKGDIPEGYSVSREKKERFSLILESASTNQTSMYLCASNNRDSYNSPLHFGNGTRLTVTDLKNVFPPEVAVFEPSEAEISHTQKATLVCLATGFYPDHVELSWWVNGKEVHSGVCTDPQPLKEQPALNDSRYALSSRLRVSATFWQDPRNHFRCQVQFYGLSENDEWTQDRAKPVTQIVSAEAWGRADHHHHHH

SEQ ID NO: 258 - protein, 243 aa, Artificial Sequence
  E200+ MAGE-A1 binder , AU2018234830A1, B122-1_alpha chain
MKPTLISVLVIIFILRGTRAQRVTQPEKLLSVFKGAPVELKCNYSYSGSPELFWYVQYSRQRLQLLLRHISRESIKGFTADLNKGETSFHLKKPFAQEEDSAMYYCALRSGGYQKVTFGTGTKLQVIPIQNPDPAVYQLRDSKSSDKSVCLFTDFDSQTNVSQSKDSDVYITDKCVLDMRSMDFKSNSAVAWSNKSDFACANAFNNSIIPEDTFFPSPESSGGGGSGHNYTTRNILPGLNITS

SEQ ID NO: 259 - protein, 268 aa, Artificial Sequence; identical to SEQ ID NO: 257
  MAGE-A1, AU2018234830A1, B122-2_beta chain

SEQ ID NO: 260 - protein, 241 aa, Artificial Sequence
  E200+TRBC1 binder , Jovi-1, WO2015132598A1, B122-1_LC
GHNYTTRNILPGLNITSDWMTQSPLSLPVSLGDQASISCRSSQRLVHSNGNTYLHWYLQKPGQSPKLLIYRVSNRFPGVPDRFSGSGSGTDFTLKISRVEAEDLGIYFCSQSTHVPYTFGGGTKLEIKRTVAAPSVFIFPPSDEQLKSGTASVVCLLNNFYPREAKVQWKVDNALQSGNSQESVTEQDSKDSTYSLSSTLTLSKADYEKHKVYACEVTHQGLSSPVTKSFNRGECHHHHHH

SEQ ID NO: 261 - protein, 233 aa, Artificial Sequence
  TRBC1, Jovi-1, WO2015132598A1, B122-2_HC
EVRLQQSGPDLIKPGASVKMSCKASGYTFTGYVMHVWKQRPGQGLEWIGFINPYNDDIQSNERFRGKATLTSDKSSTTAYMELSSLTSEDSAVYYCARGAGYNFDGAYRFFDFWGQGTTLTVSSASTKGPSVFPLAPSSKSTSGGTAALGCLVKDYFPEPVTVSWNSGALTSGVHTFPAVLQSSGLYSLSSVVTVPSSSLGTQTYICNVNHKPSNTKVDKKVEPKSCHHHHHH

SEQ ID NO: 262 - protein, 240 aa, Artificial Sequence
  E200+TRBC2 binder , F09, WO2015132598A1, B123-1_LC
GHNYTTRNILPGLNITSQPQSVSESPGKTVTISCTRSSGNFASKYVQWYQQRPGSSPTTVIYENYQRPSGVPDRFSGSIDSSSNSATLTISGLKTEDEADYYCQSYDEVSWFGGGTQLTVLGQPAAKRTVAAPSVFIFPPSDEQLKSGTASVVCLLNNFYPREAKVQWKVDNALQSGNSQESVTEQDSKDSTYSLSSTLTLSKADYEKHKVYACEVTHQGLSSPVTKSFNRGECHHHHHH

SEQ ID NO: 263 - protein, 229 aa, Artificial Sequence
  TRBC2, F09, WO2015132598A1, B123-2_HC
QMQLVQSGAEVKKPGASVKVSCKASGYTFASYYHWVRQAPGQGLEWGIINPSGGSTSYAQKFQGRVTMTRDTSTSTVYMELSRLRSDDTAVYYCASNRGGSYKSVGMDVWGQGTTVTVSSASTKGPSVFPLAPSSKSTSGGTAALGCLVKDYFPEPVTVSWNSGALTSGVHTFPAVLQSSGLYSLSSVVTVPSSSLGTQTYICNVNHKPSNTKVDKKVEPKSCHHHHHH

SEQ ID NO: 264 - protein, 241 aa, Artificial Sequence
  E200+uPAR binder , 7G1, WO2006094828, B124-1_LC
GHNYTTRNILPGLNITSDIVLTQSPASLAVSLGQRATISCRASKSVSTSGYSYMHWYQQKPGQPPKLLIYLASNLESGVPARFSGSGSGTDFTLDIHPVEEEDAATYYCQHSRELPYTFGGGTKLELKRTVAAPSVFIFPPSDEQLKSGTASVVCLLNNFYPREAKVQWKVDNALQSGNSQESVTEQDSKDSTYSLSSTLTLSKADYEKHKVYACEVTHQGLSSPVTKSFNRGECHHHHHH

SEQ ID NO: 265 - protein, 226 aa, Artificial Sequence
  uPAR, 7G1, WO2006094828, B124-2_HC
VQLQESGPELKKPGETVKISCKASGYTFTDYSMHWVKQAPGKGLKCMGWINTETTKSTYADDFKGRFALSLETSASTVYLQISNLKNEDTATYFCAREASYGEFDYWGQGTTVTVSSASTKGPSVFPLAPSSKSTSGGTAALGCLVKDYFPEPVTVSWNSGALTSGVHTFPAVLQSSGLYSLSSVVTVPSSSLGTQTYICNVNHKPSNTKVDKKVEPKSCHHHHHH

SEQ ID NO: 266 - protein, 502 aa, Artificial Sequence
  EGFRvIII targeted CAR scFv_(HL-configuration_clone_139)_CD8a_CD8TM_CD28_CD137_CD3zeta
EVQVLESGGGLVQPGGSLRLSCAASGFTFSSYAMSWVRQAPGKGLEWVSAISGSGGSTNYADSVKGRFTISRDNSKNTLYLQMNSLRAEDTAVYYCAGSSGWSEYWGQGTLVTVSSGGGGSGGGGSGGGGSDIQMTQSPSSLSASVGDRVTITCRASQGIRNNLAWYQQKPGKAPKRLIYAASNLQSGVPSRFTGSGSGTEFTLIVSSLQPEDFATYYCLQHHSYPLTSGGGTKVEIKTTTPAPRPPTPAPTIASQPLSLRPEACRPAAGGAVHTRGLDFACDIYIWAPLAGTCGVLLLSLVITLYCRSKRSRLLHSDYMNMTPRRPGPTRKHYQPYAPPRDFAAYRSKRGRKKLLYIFKQPFMRPVQTTQEEDGCSCRFPEEEEGGCELRVKFSRSADAPAYKQGQNQLYNELNLGRREEYDVLDKRRGRDPEMGGKPRRKNPQEGLYNELQKDKMAEAYSEIGMKGERRRGKGHDGLYQGLSTATKDTYDALHMQALPPR

SEQ ID NO: 267 - protein, 13 aa, Artificial Sequence
  EGFRvIII peptide
LEEKKGNYVVTDH

SEQ ID NO: 268 - protein, 237 aa, Artificial Sequence
  EGFRvIII-peptide+CD33 binder CD33, Gemtuzumab, B030-3_LC
LEEKKGNYVVTDHDIQLTQSPSTLSASVGDRVTITCRASESLDNYGIRFLTWFQQKPGKAPKLLMYAASNQGSGVPSRFSGSGSGTEFTLTISSLQPDDFATYYCQQTKEVPWSFGQGTKVEVKRTVAAPSVFIFPPSDEQLKSGTASVVCLLNNFYPREAKVQWKVDNALQSGNSQESVTEQDSKDSTYSLSSTLTLSKADYEKHKVYACEVTHQGLSSPVTKSFNRGECHHHHHH

SEQ ID NO: 269 - protein, 225 aa, Artificial Sequence; identical to SEQ ID NO: 72
  CD33, Gemtuzumab, B030-2_HC

SEQ ID NO: 270 - protein, 233 aa, Artificial Sequence
  EGFRvIII-peptide+CD33 binder  Her2, Gemtuzumab, B033-3_LC
LEEKKGNYVVTDHDIQMTQSPSSLSASVGDRVTITCRASQDVNTAVAWYQQKPGKAPKLLIYSASFLYSGVPSRFSGSRSGTDFTLTISSLQPEDFATYYCQQHYTTPPTFGQGTKVEIKRTVAAPSVFIFPPSDEQLKSGTASVVCLLNNFYPREAKVQWKVDNALQSGNSQESVTEQDSKDSTYSLSSTLTLSKADYEKHKVYACEVTHQGLSSPVTKSFNRGECHHHHHH

SEQ ID NO: 271 - protein, 229 aa, Artificial Sequence; identical to SEQ ID NO: 78
  Her2, Trastuzumab, B033-2_HC

SEQ ID NO: 272 - protein, 503 aa, Artificial Sequence
  CLDN6 targeted CAR scFv_(HL-configuration_clone_Ab3-4)_CD8a_CD8TM_CD28_CD137_CD3zeta
EVQLLESGGGLVQPGGSMRLSCAASGFTFSNYWMNWVRQAPGKGLEWVAQIRLKSDNYATHYADSVKGRFTISRDDSKNTVYLQMNSLRAEDTGVYYCNDGPPSGYWGQGTLLTVSSGGGGSGGGGSGGGGSDIQMTQSPSSLSASVGDRVTITCRISENIYSYLAWYQQKPGKAPKLLIYNAKILVEGVPSRFSGSGSGTDFTLTISSLQPEDFATYYCQHHYTVPWTFGQGTKLEIKTTTPAPRPPTPAPTIASQPLSLRPEACRPAAGGAVHTRGLDFACDIYIWAPLAGTCGVLLLSLVITLYCRSKRSRLLHSDYMNMTPRRPGPTRKHYQPYAPPRDFAAYRSKRGRKKLLYIFKQPFMRPVQTTQEEDGCSCRFPEEEEGGCELRVKFSRSADAPAYKQGQNQLYNELNLGRREEYDVLDKRRGRDPEMGGKPRRKNPQEGLYNELQKDKMAEAYSEIGMKGERRRGKGHDGLYQGLSTATKDTYDALHMQALPPR

SEQ ID NO: 273 - protein, 23 aa, Artificial Sequence
  CLDN6 peptide 23-mer
WTAHAIIRDFYNPLVAEAQKREL

SEQ ID NO: 274 - protein, 13 aa, Artificial Sequence
  CLDN6 peptide 13-mer
TAHAIIRDFYNPL

SEQ ID NO: 275 - protein, 10 aa, Artificial Sequence
  CLDN6 peptide 10-mer
LVAEAQKREL

SEQ ID NO: 276 - protein, 247 aa, Artificial Sequence
  CLDN6-peptide+CD33 binder CD33, Gemtuzumab, B030-4_LC
WTAHAIIRDFYNPLVAEAQKRELDIQLTQSPSTLSASVGDRVTITCRASESLDNYGIRFLTWFQQKPGKAPKLLMYAASNQGSGVPSRFSGSGSGTEFTLTISSLQPDDFATYYCQQTKEVPWSFGQGTKVEVKRTVAAPSVFIFPPSDEQLKSGTASVVCLLNNFYPREAKVQWKVDNALQSGNSQESVTEQDSKDSTYSLSSTLTLSKADYEKHKVYACEVTHQGLSSPVTKSFNRGECHHHHHH

SEQ ID NO: 277 - protein, 225 aa, Artificial Sequence; identical to SEQ ID NO: 72
  CD33, Gemtuzumab, B030-2_HC

SEQ ID NO: 278 - protein, 243 aa, Artificial Sequence
  CLDN6-peptide+Her2 binder Her2, Trastuzumab, B033-4_LC
WTAHAIIRDFYNPLVAEAQKRELDIQMTQSPSSLSASVGDRVTITCRASQDVNTAVAWYQQKPGKAPKLLIYSASFLYSGVPSRFSGSRSGTDFTLTISSLQPEDFATYYCQQHYTTPPTFGQGTKVEIKRTVAAPSVFIFPPSDEQLKSGTASVVCLLNNFYPREAKVQWKVDNALQSGNSQESVTEQDSKDSTYSLSSTLTLSKADYEKHKVYACEVTHQGLSSPVTKSFNRGECHHHHHH

SEQ ID NO: 279 - protein, 229 aa, Artificial Sequence; identical to SEQ ID NO: 78
  Her2, Trastuzumab, B033-2_HC

SEQ ID NO: 280 - protein, 243 aa, Artificial Sequence
  E200+B7H7 binder , 4.5, WO2014100823A1, B125-1_LC
GHNYTTRNILPGLNITSDIVMTQSPSSLAVSAGEKVTISCLSSQSLFSSNTKRNYLNWYLQKPGQSPKLLIYHASTRLTGVPGRFIGSGSGTDFTLTVSTVQAEDLGDYFCQQHYETPLTFGDGTRLEIKRTVAAPSVFIFPPSDEQLKSGTASVVCLLNNFYPREAKVQWKVDNALQSGNSQESVTEQDSKDSTYSLSSTLTLSKADYEKHKVYACEVTHQGLSSPVTKSFNRGECHHHHHH

SEQ ID NO: 281 - protein, 229 aa, Artificial Sequence
  B7H7, 4.5, WO2014100823A1, B125-2_HC
QIQLQESGPGLVKPSQSLSLTCSVTGFSITTGGYYWNWIRQFPGKKLEWMGYIYTSGRTSYNPSLKSRISITRDTSKNQFFLQLNSMTTEDTATYYCADMADKGGWFAYWGQGTLVTVSSASTKGPSVFPLAPSSKSTSGGTAALGCLVKDYFPEPVTVSWNSGALTSGVHTFPAVLQSSGLYSLSSVVTVPSSSLGTQTYICNVNHKPSNTKVDKKVEPKSCHHHHHH

SEQ ID NO: 282 - protein, 242 aa, Artificial Sequence
  E200+CD34 binder , h4C8b, US20100311955A1, B126-1_LC
GHNYTTRNILPGLNITSDVLLTQSPLSLPVTLGQPASISCRSSQTIVHSNGNTYLEWFQQRPGQSPRLLIYQVSNRFSGVPDRFSGSGSGTDFTLKISRVEAEDVGVYYCFQGSHVPRTFGGGTKVEIKRTVAAPSVFIFPPSDEQLKSGTASVVCLLNNFYPREAKVQWKVDNALQSGNSQESVTEQDSKDSTYSLSSTLTLSKADYEKHKVYACEVTHQGLSSPVTKSFNRGECHHHHHH

SEQ ID NO: 283 - protein, 231 aa, Artificial Sequence
  CD34, h4C8b, US20100311955A1, B126-2_HC
QIQLVQSGSELKKPGASVKVSCKASGYTFTNYGMNWVRQAPGQGLKWMGWINTNTGEPKYAEEFKGRFALSLDTSVSTAYLQINSLKAEDTAVYFCARGYGNYARGAWLAYWGQGTLVTVSSASTKGPSVFPLAPSSKSTSGGTAALGCLVKDYFPEPVTVSWNSGALTSGVHTFPAVLQSSGLYSLSSVVTVPSSSLGTQTYICNVNHKPSNTKVDKKVEPKSCHHHHHH

SEQ ID NO: 284 - protein, 237 aa, Artificial Sequence
  E200+CD7 binder , seq 1, WO2003051926, B127-1_LC
GHNYTTRNILPGLNITSDIQMTQTTSSLSASLGDRVTISCSASQGISNYLNWYQQKPDGTVKLLIYYTSSLHSGVPSRFSGSGSGTDYSLTISNLEPEDIATYYCQQYSKLPYTFGGGTKLEIKRTVAAPSVFIFPPSDEQLKSGTASVVCLLNNFYPREAKVQWKVDNALQSGNSQESVTEQDSKDSTYSLSSTLTLSKADYEKHKVYACEVTHQGLSSPVTKSFNRGECHHHHHH

SEQ ID NO: 285 - protein, 226 aa, Artificial Sequence
  CD7, seq 1, WO2003051926, B127-2_HC
EVQLVESGGGLVKPGGSLKLSCAASGLTFSSYAMSWVRQTPEKRLEWVASISSGGFTYYPDSVKGRFTISRDNARNILYLQMSSLRSEDTAMYYCARDEVRGYLDVWGAGTTVTVSSASTKGPSVFPLAPSSKSTSGGTAALGCLVKDYFPEPVTVSWNSGALTSGVHTFPAVLQSSGLYSLSSVVTVPSSSLGTQTYICNVNHKPSNTKVDKKVEPKSCHHHHHH

SEQ ID NO: 286 - protein, 251 aa, Artificial Sequence
  E200+CD7 binder , seq 32, US20170226204, B128-1_HC
GHNYTTRNILPGLNITSMDVQLQESGGGSVQAGGSLRLSCPASGYTFSHYCMGWNRQAPGKEREEVATIDTDDTPTYADSVMGRFTISRDNANNALYLQMNDLKPEDTSMYYCAIWMKLRGSCHDRRLEVRGQGTQVTVSINASTKGPSVFPLAPSSKSTSGGTAALGCLVKDYFPEPVTVSWNSGALTSGVHTFPAVLQSSGLYSLSSVVTVPSSSLGTQTYICNVNHKPSNTKVDKKVEPKSCHHHHHH

SEQ ID NO: 287 - protein, 241 aa, Artificial Sequence
  E200+GPRC5D binder , seq 1, SG10202007326Q, B129-1_LC
GHNYTTRNILPGLNITSQSVLTQPPSVSAAPGQKVTIPCSGSRSNVGNYYVSWYQQLPGTAPKLLIYDNNKRPSGIPDRFSGSKSGTSATLGITGLQTGDEADYFCGTWDGSLSAHVFGTGTKVTVLGRTVAAPSVFIFPPSDEQLKSGTASVVCLLNNFYPREAKVQWKVDNALQSGNSQESVTEQDSKDSTYSLSSTLTLSKADYEKHKVYACEVTHQGLSSPVTKSFNRGECHHHHHH

SEQ ID NO: 288 - protein, 229 aa, Artificial Sequence
  GPRC5D, seq 1, SG10202007326Q, B129-2_HC
QVQLVQSGSELKKPGASVRVSCTASGYTFTSYYMHWVRQAPGQGLEWMGVINPNAGSTRYAQKFQGRVTMSTDTSTSTAYMDLSSLRSEDTAVYYCARGMYRSLLFYDPWGQGTLVTVSSASTKGPSVFPLAPSSKSTSGGTAALGCLVKDYFPEPVTVSWNSGALTSGVHTFPAVLQSSGLYSLSSVVTVPSSSLGTQTYICNVNHKPSNTKVDKKVEPKSCHHHHHH

SEQ ID NO: 289 - protein, 237 aa, Artificial Sequence
  E200+TIM-3 binder , h1701-009NKG, EP3587452, B130-1_LC
GHNYTTRNILPGLNITSDIQMTQSPSSLSASVGDRVTITCLASQPIGIWLAWYQQKPGKAPKLLIYAATSLADGVPSRFSGSGSGTDFTFTISSLQPEDIATYYCQQLYSSPWTFGGGTKVEIKRTVAAPSVFIFPPSDEQLKSGTASVVCLLNNFYPREAKVQWKVDNALQSGNSQESVTEQDSKDSTYSLSSTLTLSKADYEKHKVYACEVTHQGLSSPVTKSFNRGECHHHHHH

SEQ ID NO: 290 - protein, 230 aa, Artificial Sequence
  TIM-3, h1701-009NKG, EP3587452, B130-2_HC
QVQLVQSGAEVKKPGASVKVSCKASGYTFTDYYMNWVRQAPGQGLEWMGDIIPNKGGSKYNQKFKDRVTMTTDTSTSTAYMELRSLRSDDTAVYYCATWGYGSSYRWFDYWGQGTLVTVSSASTKGPSVFPLAPSSKSTSGGTAALGCLVKDYFPEPVTVSWNSGALTSGVHTFPAVLQSSGLYSLSSVVTVPSSSLGTQTYICNVNHKPSNTKVDKKVEPKSCHHHHHH

SEQ ID NO: 291 - protein, 242 aa, Artificial Sequence
  E200+CD191 binder , hzmAb5-06_LV5HV14, EP3656791, B131-1_LC
GHNYTTRNILPGLNITSDIVMTQSPLSLPVTLGEPASISCRSSQSLVHRNGITFFHWYLQKPGQSPKLLIYKISNRFSGVPDRFSGSGSGTDFTLKISRVEAEDVGVYFCSQGTHVPPTFGQGTKLEIKRTVAAPSVFIFPPSDEQLKSGTASVVCLLNNFYPREAKVQWKVDNALQSGNSQESVTEQDSKDSTYSLSSTLTLSKADYEKHKVYACEVTHQGLSSPVTKSFNRGECHHHHHH

SEQ ID NO: 292 - protein, 228 aa, Artificial Sequence
  CD191, hzmAb5-06_LV5HV14, EP3656791, B131-2_HC
QVQLQQSGPGLVKPSQTLSITCTVSGFSLNNYGVHWVRQPPGKGLEWLGVIWSAGTTVYNAAAISRLTISKDTSKNQVSFKMSSLTAADTAVYYCAKDGSRYYTAMDYWGQGTLVTVSSASTKGPSVFPLAPSSKSTSGGTAALGCLVKDYFPEPVTVSWNSGALTSGVHTFPAVLQSSGLYSLSSVVTVPSSSLGTQTYICNVNHKPSNTKVDKKVEPKSCHHHHHH

SEQ ID NO: 293 - protein, 236 aa, Artificial Sequence
  E200+CD66b binder , BW250-183, EP0585570A1, B132-1_LC
GHNYTTRNILPGLNITSDIQMTQSPSSLSASVGDRVTITCRASSSVSYMHWYQQKPGKAPKPLIYATSNLASGVPSRFSGSGSGTDFTFTISSLQPEDIATYYCQQWSSNPLTFGQGTKVEIKRTVAAPSVFIFPPSDEQLKSGTASVVCLLNNFYPREAKVQWKVDNALQSGNSQESVTEQDSKDSTYSLSSTLTLSKADYEKHKVYACEVTHQGLSSPVTKSFNRGECHHHHHH

SEQ ID NO: 294 - protein, 228 aa, Artificial Sequence
  CD66b, BW250-183, EP0585570A1, B132-2_HC
QVQLQESGPGLVRPSQTLSLTCTVSGFSDYYMNWVRQPPGRGLEWIGFISNKPNGHTTEYSASVKGRVTMLRDTSKNQFSLRLSSVTAADTAVYYCARDKGIRWYFDVWGQGSLVTVSSASTKGPSVFPLAPSSKSTSGGTAALGCLVKDYFPEPVTVSWNSGALTSGVHTFPAVLQSSGLYSLSSVVTVPSSSLGTQTYICNVNHKPSNTKVDKKVEPKSCHHHHHH

SEQ ID NO: 295 - protein, 237 aa, Artificial Sequence
  E200+CD66b binder , seq_1, WO2017220369A1, B133-1_LC
GHNYTTRNILPGLNITSDIQMTQSPSSLSASLGERVSLTCRASQEISGYLSWHQQKPDGTIKRLLYSTSTLDSGVPKRFSGSRSGSDYSLTISSLESEDFADYYCLQYAISPPTFGGGTKLEIKRTVAAPSVFIFPPSDEQLKSGTASVVCLLNNFYPREAKVQWKVDNALQSGNSQESVTEQDSKDSTYSLSSTLTLSKADYEKHKVYACEVTHQGLSSPVTKSFNRGECHHHHHH

SEQ ID NO: 296 - protein, 230 aa, Artificial Sequence
  CD11b, seq_1, WO2017220369A1, B133-2_HC
QVTLKESGPGILQTSQTLSLTCSFSGFSLSTSGMGVSWIRQPSGKGLEWLAHIYWDDDKRYNPSLKSRLTISKDTSRNQVFLKITSVDTTDTATYYCALNYYNSTYNFDFWGQGTTLTVSSASTKGPSVFPLAPSSKSTSGGTAALGCLVKDYFPEPVTVSWNSGALTSGVHTFPAVLQSSGLYSLSSVVTVPSSSLGTQTYICNVNHKPSNTKVDKKVEPKSCHHHHHH

SEQ ID NO: 297 - protein, 237 aa, Artificial Sequence
  E200+EMR2 binder , hSC93.253, WO2017087800A1, B134-1_LC
GHNYTTRNILPGLNITSDIQMTQSPSSLSASVGDRVTITCKASQNVRTTVDWYQQKPGKAPKLLIYLASNRHTGVPSRFSGSGSGTDFTLTISSLQPEDFATYYCLQHRNYPLTFGGGTKVEIKRTVAAPSVFIFPPSDEQLKSGTASVVCLLNNFYPREAKVQWKVDNALQSGNSQESVTEQDSKDSTYSLSSTLTLSKADYEKHKVYACEVTHQGLSSPVTKSFNRGECHHHHHH

SEQ ID NO: 298 - protein, 229 aa, Artificial Sequence
  EMR2, hSC93.253, WO2017087800A1, B134-2_HC
EVQLVESGGGLVKPGGSLRLSCAASGFTFSSYDMSWVRQAPGKGLEWVSTISSGGNYNYYPDSVKGRFTISRDNAKNSLYLQMNSLRAEDTAVYYCARHYDYPDYAMDYWGQGTTVTVSSASTKGPSVFPLAPSSKSTSGGTAALGCLVKDYFPEPVTVSWNSGALTSGVHTFPAVLQSSGLYSLSSVVTVPSSSLGTQTYICNVNHKPSNTKVDKKVEPKSCHHHHHH

SEQ ID NO: 299 - protein, 242 aa, Artificial Sequence
  E200+MUC16 binder , 18C6, WO2016149368A1, B135-1_LC
GHNYTTRNILPGLNITSDIVMTQAAPSVPVTPGESVSISCRSSKSLLHSNGNTYLYWFLQRPGQSPQRLIYYMSNLASGVPDRFSGRGSGTDFTLRISRVEAEDVGVYYCMQSLEYPLTFGGGTKLEIKRTVAAPSVFIFPPSDEQLKSGTASVVCLLNNFYPREAKVQWKVDNALQSGNSQESVTEQDSKDSTYSLSSTLTLSKADYEKHKVYACEVTHQGLSSPVTKSFNRGECHHHHHH

SEQ ID NO: 300 - protein, 232 aa, Artificial Sequence
  MUC16, 18C6, WO2016149368A1, B135-2_HC
QVTLKESGPGILQPSQTLSLTCSFSGFSLSTVGMGVGWSRQPSGKGLEWLAHIWWDDEDKYYNPALKSRLTISKDTSKNQVFLKIANVDTADTATYYCTRIGTAQATDALDYWGQGTSVTVSSASTKGPSVFPLAPSSKSTSGGTAALGCLVKDYFPEPVTVSWNSGALTSGVHTFPAVLQSSGLYSLSSVVTVPSSSLGTQTYICNVNHKPSNTKVDKKVEPKSCHHHHHH

SEQ ID NO: 301 - protein, 270 aa, Artificial Sequence
  E200+ scTCR NYESO-1v1 binder , 18C6, WO2017109496A1, B136-1_v1
GHNYTTRNILPGLNITSAQSVAQPEDLVNVAEGNPLTVKCTYSVSGNPYLFWYVQYPNRGLQFLLKYLGDSALVKGSYGFEAEFNKSQTSFHLKKPSALVSDSALYFCAVRDINSGAGSYQLTFGKGTKLSVIPGGGGSGGGGSGGGGSSAVISQKPSRDIKQRGTSLTIQCQVDKRLALMFWYRQQPGQSPTLIATAWTGGEATYESGFVIDKFPISRPNLTFSTLTVSNMSPEDSSIYLCSVGGSGAADTQYFGPGTRLTVLHHHHHH

SEQ ID NO: 302 - protein, 275 aa, Artificial Sequence
  E200+ scTCR NYESO-1v2 binder , WO2017109496A1, B136-2_v2
HHHHHHAQSVAQPEDLVNVAEGNPLTVKCTYSVSGNPYLFWYVQYPNRGLQFLLKYLGDSALVKGSYGFEAEFNKSQTSFHLKKPSALVSDSALYFCAVRDINSGAGSYQLTFGKGTKLSVIPGGGGSGGGGSGGGGSSAVISQKPSRDIKQRGTSLTIQCQVDKRLALMFWYRQQPGQSPTLIATAWTGGEATYESGFVIDKFPISRPNLTFSTLTVSNMSPEDSSIYLCSVGGSGAADTQYFGPGTRLTVLGGGGSGHNYTTRNILPGLNITS

SEQ ID NO: 303 - protein, 280 aa, Artificial Sequence
  E200+ scTCR SURVIVINv1 binder , 18C6, NZ719707, B137-1_v1
GHNYTTRNILPGLNITSSQTIHQWPATLVQPVGSPLSLECTVEGTSNPNLYWYRQAAGRGLELLFYSVGIGQISSEVPQNLFASRPQDRQFILSSKKLLLSDSGFYLCAWSIGAEQFFGPGTRLTVLEDLKNGSADDAKKDAAKKDGKSGGGGSGGGGSGGGGSQKEVEQNSGPLSVPEGAIASLNCTYSDRGSQSFFWYRQYSGKSPELIMSIYSNGDKEDGRFTAQLNKASQYVSLLIRDSQPSDSATYLCAVSKGYKMFGDGTQLVVKPNIHHHHHH

SEQ ID NO: 304 - protein, 285 aa, Artificial Sequence
  E200+ scTCR NYESO-1v2 binder , NZ719707, B137-2_v2
HHHHHHSQTIHQWPATLVQPVGSPLSLECTVEGTSNPNLYWYRQAAGRGLELLFYSVGIGQISSEVPQNLFASRPQDRQFILSSKKLLLSDSGFYLCAWSIGAEQFFGPGTRLTVLEDLKNGSADDAKKDAAKKDGKSGGGGSGGGGSGGGGSQKEVEQNSGPLSVPEGAIASLNCTYSDRGSQSFFWYRQYSGKSPELIMSIYSNGDKEDGRFTAQLNKASQYVSLLIRDSQPSDSATYLCAVSKGYKMFGDGTQLVVKPNIGGGGSGHNYTTRNILPGLNITS

SEQ ID NO: 305 - protein, 165 aa, Artificial Sequence
  E200+ dAPRIL binder , WO2015052538A1, B138-1_v1
GHNYTTRNILPGLNITSSVLHLVPINATSKDDSDVTEVMWQPALRRGRGLQAQGYGVRIQDAGVYLLYSQVLFQDVTFTMGQVVSREGQGRQETLFRCIRSMPSHPDRAYNSCYSAGVFHLHQGDILSVIIPRARAKLNLSPHGTFLGFVKLSGGGSDPHHHHHH

SEQ ID NO: 306 - protein, 165 aa, Artificial Sequence
  E200+ dAPRIL binder , WO2015052538A1, B139-2_v2
HHHHHHSVLHLVPINATSKDDSDVTEVMWQPALRRGRGLQAQGYGVRIQDAGVYLLYSQVLFQDVTFTMGQVVSREGQGRQETLFRCIRSMPSHPDRAYNSCYSAGVFHLHQGDILSVIIPRARAKLNLSPHGTFLGFVKLSGGGSDPGHNYTTRNILPGLNITS

SEQ ID NO: 307 - protein, 226 aa, Artificial Sequence
  E200+ CD200, samalizumab, B140-1
QVQLQQSGSELKKPGASVKISCKASGYSFTDYIILWVRQNPGKGLEWIGHIDPYYGSSNYNLKFKGRVTITADQSTTTAYMELSSLRSEDTAVYYCGRSKRDYFDYWGQGTTLTVSSASTKGPSVFPLAPSSKSTSGGTAALGCLVKDYFPEPVTVSWNSGALTSGVHTFPAVLQSSGLYSLSSVVTVPSSSLGTQTYICNVNHKPSNTKVDKKVEPKSCHHHHHH

SEQ ID NO: 308 - protein, 220 aa, Artificial Sequence
  CD200, LC, samalizumab, B140-2
DIQMTQSPSSLSASIGDRVTITCKASQDINSYLSWFQQKPGKAPKLLIYRANRLVDGVPSRFSGSGSGTDYTLTISSLQPEDFAVYYCLQYDEFPYTFGGGTKLEIKRTVAAPSVFIFPPSDEQLKSGTASVVCLLNNFYPREAKVQWKVDNALQSGNSQESVTEQDSKDSTYSLSSTLTLSKADYEKHKVYACEVTHQGLSSPVTKSFNRGECHHHHHH

SEQ ID NO: 309 - protein, 265 aa, Artificial Sequence
  E200+CD19 binder in scFv format  CD19, FMC63, B016_scFv_LH
DIQMTQTTSSLSASLGDRVTISCRASQDISKYLNWYQQKPDGTVKLLIYHTSRLHSGVPSRFSGSGSGTDYSLTISNLEQEDIATYFCQQGNTLPYTFGGGTKLEITGGGGSGGGGSGGGGSEVKLQESGPGLVAPSQSLSVTCTVSGVSLPDYGVSWIRQPPRKGLEWLGVIWGSETTYYNSALKSRLTIIKDNSKSQVFLKMNSLQTDDTAIYYCAKHYYYGGSYAMDYWGQGTSVTVSSGHNYTTRNILPGLNITSHHHHHH

SEQ ID NO: 310 - protein, 15 aa, Artificial Sequence
  Modified IgG1 hinge region
EPKSSDKTHTSPPSP

SEQ ID NO: 311 - protein, 13 aa, Artificial Sequence
  Modified IgG1 hinge region
EPKSSDKTHTSPP

SEQ ID NO: 312 - protein, 14 aa, Artificial Sequence
  Modified IgG1 hinge region
EPKSSDKTHTSPPP

SEQ ID NO: 313 - protein, 10 aa, Artificial Sequence
  Modified IgG1 hinge region
EPKSSDKTHT

SEQ ID NO: 314 - protein, 10 aa, Artificial Sequence
  Modified IgG1 hinge region
DKTHTSPPSP

SEQ ID NO: 315 - protein, 8 aa, Artificial Sequence
  Modified IgG1 hinge region
DKTHTSPP

SEQ ID NO: 316 - protein, 12 aa, Artificial Sequence
  Modified IgG1 hinge region
EPKSDKTHTPPP

SEQ ID NO: 317 - protein, 14 aa, Artificial Sequence
  Modified IgG1 hinge region
EPKSDKTHTSPPSP

SEQ ID NO: 318 - protein, 15 aa, Artificial Sequence
  Modified IgG1 hinge region
EPKSGDKTHTGPPGP

SEQ ID NO: 319 - protein, 13 aa, Artificial Sequence
  Modified IgG1 hinge region
EPKSGDKTHTGPP

SEQ ID NO: 320 - protein, 14 aa, Artificial Sequence
  Modified IgG1 hinge region
EPKSGDKTHTGPPP

SEQ ID NO: 321 - protein, 10 aa, Artificial Sequence
  Modified IgG1 hinge region
EPKSGDKTHT

SEQ ID NO: 322 - protein, 10 aa, Artificial Sequence
  Modified IgG1 hinge region
DKTHTGPPGP

SEQ ID NO: 323 - protein, 8 aa, Artificial Sequence
  Modified IgG1 hinge region
DKTHTGPP

SEQ ID NO: 324 - protein, 14 aa, Artificial Sequence
  Modified IgG1 hinge region
EPKSDKTHTGPPGP

SEQ ID NO: 325 - protein, 15 aa, Artificial Sequence
  Modified IgG1 hinge region
EPKSGDKTHTSPPSP

SEQ ID NO: 326 - protein, 15 aa, Artificial Sequence
  Modified IgG1 hinge region
EPKSGDKTHTGPPSP

SEQ ID NO: 327 - protein, 15 aa, Artificial Sequence
  Modified IgG1 hinge region
EPKSSDKTHTGPPGP

SEQ ID NO: 328 - protein, 15 aa, Artificial Sequence
  Modified IgG1 hinge region
EPKSSDKTHTGPPSP

SEQ ID NO: 329 - protein, 13 aa, Artificial Sequence
  Modified IgG1 hinge region
EPKSSDKTHTGPP

SEQ ID NO: 330 - protein, 13 aa, Artificial Sequence
  Modified IgG1 hinge region
EPKSGDKTHTSPP

SEQ ID NO: 331 - protein, 15 aa, Artificial Sequence
  Modified IgG1 hinge region
EPKSTDKTHTTPPTP

SEQ ID NO: 332 - protein, 13 aa, Artificial Sequence
  Modified IgG1 hinge region
EPKSTDKTHTTPP

SEQ ID NO: 333 - protein, 14 aa, Artificial Sequence
  Modified IgG1 hinge region
EPKSTDKTHTTPPP

SEQ ID NO: 334 - protein, 10 aa, Artificial Sequence
  Modified IgG1 hinge region
EPKSTDKTHT

SEQ ID NO: 335 - protein, 10 aa, Artificial Sequence
  Modified IgG1 hinge region
DKTHTTPPTP

SEQ ID NO: 336 - protein, 8 aa, Artificial Sequence
  Modified IgG1 hinge region
DKTHTTPP

SEQ ID NO: 337 - protein, 14 aa, Artificial Sequence
  Modified IgG1 hinge region
EPKSDKTHTTPPTP

SEQ ID NO: 338 - protein, 15 aa, Artificial Sequence
  Modified IgG1 hinge region
EPKSSDKTHTTPPTP

SEQ ID NO: 339 - protein, 15 aa, Artificial Sequence
  Modified IgG1 hinge region
EPKSSDKTHTSPPTP

SEQ ID NO: 340 - protein, 15 aa, Artificial Sequence
  Modified IgG1 hinge region
EPKSADKTHTLPPMP

SEQ ID NO: 341 - protein, 15 aa, Artificial Sequence
  Modified IgG1 hinge region
EPKSVDKTHTLPPIP

SEQ ID NO: 342 - protein, 15 aa, Artificial Sequence
  Modified IgG1 hinge region
EPKSLDKTHTAPPAP

SEQ ID NO: 343 - protein, 13 aa, Artificial Sequence
  Modified IgG1 hinge region
EPKSVDKTHTAPP

SEQ ID NO: 344 - protein, 13 aa, Artificial Sequence
  Modified IgG1 hinge region
EPKSIDKTHTLPP

SEQ ID NO: 345 - protein, 10 aa, Artificial Sequence
  Modified IgG1 hinge region
DKTHTAPPLP

SEQ ID NO: 346 - protein, 10 aa, Artificial Sequence
  Modified IgG1 hinge region
DKTHTVPPLP

SEQ ID NO: 347 - protein, 15 aa, Artificial Sequence
  Wild type IgG1
EPKSCDKTHTCPPCP

SEQ ID NO: 348 - protein, 12 aa, Artificial Sequence
  Mutated IgG2
ERKCCVECPPCP

SEQ ID NO: 349 - protein, 12 aa, Artificial Sequence
  Mutated IgG2
  misc_feature (4)..(5): Xaa can be any naturally occurring amino acid
  misc_feature (8)..(8): Xaa can be any naturally occurring amino acid
  misc_feature (11)..(11): Xaa can be any naturally occurring amino acid
ERKXXVEXPPXP

SEQ ID NO: 350 - protein, 10 aa, Artificial Sequence
  Mutated IgG2
  misc_feature (4)..(5): Xaa can be any naturally occurring amino acid
  misc_feature (8)..(8): Xaa can be any naturally occurring amino acid
ERKXXVEXPP

SEQ ID NO: 351 - protein, 7 aa, Artificial Sequence
  Mutated IgG2
  misc_feature (3)..(3): Xaa can be any naturally occurring amino acid
  misc_feature (6)..(6): Xaa can be any naturally occurring amino acid
VEXPPXP

SEQ ID NO: 352 - protein, 17 aa, Artificial Sequence
  Wild-type IgG3
ELKTPLGDTTHTCPRCP

SEQ ID NO: 353 - protein, 17 aa, Artificial Sequence
  Mutated IgG3
  misc_feature (13)..(13): Xaa can be any naturally occurring amino acid
  misc_feature (16)..(16): Xaa can be any naturally occurring amino acid
ELKTPLGDTTHTXPRXP

SEQ ID NO: 354 - protein, 15 aa, Artificial Sequence
  Mutated IgG3
  misc_feature (13)..(13): Xaa can be any naturally occurring amino acid
ELKTPLGDTTHTXPR

SEQ ID NO: 355 - protein, 12 aa, Artificial Sequence
  Mutated IgG3
ELKTPLGDTTHT

SEQ ID NO: 356 - protein, 15 aa, Artificial Sequence
  Wild-type IgG3
EPKSCDTPPPCPRCP

SEQ ID NO: 357 - protein, 15 aa, Artificial Sequence
  Mutated IgG3
  misc_feature (5)..(5): Xaa can be any naturally occurring amino acid
  misc_feature (11)..(11): Xaa can be any naturally occurring amino acid
  misc_feature (14)..(14): Xaa can be any naturally occurring amino acid
EPKSXDTPPPXPRXP

SEQ ID NO: 358 - protein, 13 aa, Artificial Sequence
  Mutated IgG3
  misc_feature (5)..(5): Xaa can be any naturally occurring amino acid
  misc_feature (11)..(11): Xaa can be any naturally occurring amino acid
EPKSXDTPPPXPR

SEQ ID NO: 359 - protein, 10 aa, Artificial Sequence
  Mutated IgG3
  misc_feature (5)..(5): Xaa can be any naturally occurring amino acid
EPKSXDTPPP

SEQ ID NO: 360 - protein, 10 aa, Artificial Sequence
  Mutated IgG3
  misc_feature (6)..(6): Xaa can be any naturally occurring amino acid
  misc_feature (9)..(9): Xaa can be any naturally occurring amino acid
DTPPPXPRXP

SEQ ID NO: 361 - protein, 12 aa, Artificial Sequence
  Wild-type IgG4
ESKYGPPCPSCP

SEQ ID NO: 362 - protein, 12 aa, Artificial Sequence
  Mutated IgG4
  misc_feature (2)..(2): Xaa can be any naturally occurring amino acid
  misc_feature (10)..(10): Xaa can be any naturally occurring amino acid
EXKYGPPCPXCP

SEQ ID NO: 363 - protein, 9 aa, Artificial Sequence
  Mutated IgG4
  misc_feature (2)..(2): Xaa can be any naturally occurring amino acid
EXKYGPPCP

SEQ ID NO: 364 - protein, 10 aa, Artificial Sequence
  Mutated IgG4
  misc_feature (8)..(8): Xaa can be any naturally occurring amino acid
KYGPPCPXCP

SEQ ID NO: 365 - protein, 27 aa, Artificial Sequence
  E200+IgG hinge
GHNYTTRNILPGLNITSEPKSSDKTHT

SEQ ID NO: 366 - protein, 29 aa, Artificial Sequence
  E200+GS linker_IgG hinge
GHNYTTRNILPGLNITSGSEPKSSDKTHT

SEQ ID NO: 367 - protein, 32 aa, Artificial Sequence
  E200+G4S linker+IgG hinge
GHNYTTRNILPGLNITSGGGGSEPKSSDKTHT

SEQ ID NO: 368 - protein, 37 aa, Artificial Sequence
  Extended E200+ _IgG hinge
GHNYTTRNILPGLNITSTFHKTSGSGKEPKSSDKTHT

SEQ ID NO: 369 - protein, 39 aa, Artificial Sequence
  Extended E200+ GS linker+_IgG hinge
GHNYTTRNILPGLNITSTFHKTSGSGKGSEPKSSDKTHT

SEQ ID NO: 370 - protein, 41 aa, Artificial Sequence
  Extended E200+ G4S linker+_IgG hinge
GHNYTTRNILPGLNITSTFHKTSGSGKGGGSEPKSSDKTHT

SEQ ID NO: 371 - protein, 29 aa, Artificial Sequence
  E200+IgG hinge+GS linker
GHNYTTRNILPGLNITSEPKSSDKTHTGS

SEQ ID NO: 372 - protein, 31 aa, Artificial Sequence
  E200+GS linker+IgG hinge+GS linker
GHNYTTRNILPGLNITSGSEPKSSDKTHTGS

SEQ ID NO: 373 - protein, 34 aa, Artificial Sequence
  E200+G4Slinker+IgG hinge+GS linker
GHNYTTRNILPGLNITSGGGGSEPKSSDKTHTGS

SEQ ID NO: 374 - protein, 39 aa, Artificial Sequence
  Extended E200+_IgG hinge+GSlinker
GHNYTTRNILPGLNITSTFHKTSGSGKEPKSSDKTHTGS

SEQ ID NO: 375 - protein, 41 aa, Artificial Sequence
  Extended E200+GS linker+_IgG hinge+GSlinker
GHNYTTRNILPGLNITSTFHKTSGSGKGSEPKSSDKTHTGS

SEQ ID NO: 376 - protein, 44 aa, Artificial Sequence
  Extended E200+G4S linker+_IgG hinge+GSlinker
GHNYTTRNILPGLNITSTFHKTSGSGKGGGGSEPKSSDKTHTGS

SEQ ID NO: 377 - protein, 32 aa, Artificial Sequence
  E200+IgG hinge+G4S linker
GHNYTTRNILPGLNITSEPKSSDKTHTGGGGS

SEQ ID NO: 378 - protein, 34 aa, Artificial Sequence
  E200+GS linker+IgG hinge+G4S linker
GHNYTTRNILPGLNITSGSEPKSSDKTHTGGGGS

SEQ ID NO: 379 - protein, 37 aa, Artificial Sequence
  E200+G4S linker+IgG hinge+G4S linker
GHNYTTRNILPGLNITSGGGGSEPKSSDKTHTGGGGS

SEQ ID NO: 380 - protein, 42 aa, Artificial Sequence
  Extended E200+IgG hinge+G4S linker
GHNYTTRNILPGLNITSTFHKTSGSGKEPKSSDKTHTGGGGS

SEQ ID NO: 381 - protein, 44 aa, Artificial Sequence
  Extended E200+GS linker+IgG hinge+G4S linker
GHNYTTRNILPGLNITSTFHKTSGSGKGSEPKSSDKTHTGGGGS

SEQ ID NO: 382 - protein, 47 aa, Artificial Sequence
  Extended E200+G4S linker+IgG hinge+G4S linker
GHNYTTRNILPGLNITSTFHKTSGSGKGGGGSEPKSSDKTHTGGGGS

SEQ ID NO: 383 - protein, 30 aa, Artificial Sequence
  N-term extended E200 +IgG hinge
DFPGHNYTTRNILPGLNITSEPKSSDKTHT

SEQ ID NO: 384 - protein, 32 aa, Artificial Sequence
  N-term extended E200 +GS linker+IgG hinge
DFPGHNYTTRNILPGLNITSGSEPKSSDKTHT

SEQ ID NO: 385 - protein, 35 aa, Artificial Sequence
  N-term extended E200 +G4S linker+IgG hinge
DFPGHNYTTRNILPGLNITSGGGGSEPKSSDKTHT

SEQ ID NO: 386 - protein, 40 aa, Artificial Sequence
  N and C term extended E200+IgG hinge
DFPGHNYTTRNILPGLNITSTFHKTSGSGKEPKSSDKTHT

SEQ ID NO: 387 - protein, 42 aa, Artificial Sequence
  N and C term extended E200+GS linker+IgG hinge
DFPGHNYTTRNILPGLNITSTFHKTSGSGKGSEPKSSDKTHT

SEQ ID NO: 388 - protein, 45 aa, Artificial Sequence
  N and C term extended E200+ G4S linker+ IgG hinge
DFPGHNYTTRNILPGLNITSTFHKTSGSGKGGGGSEPKSSDKTHT

SEQ ID NO: 389 - protein, 32 aa, Artificial Sequence
  N-term extended E200+IgG hinge +GS linker
DFPGHNYTTRNILPGLNITSEPKSSDKTHTGS

SEQ ID NO: 390 - protein, 34 aa, Artificial Sequence
  N-term extended E200+GS linker+IgG hinge +GS linker
DFPGHNYTTRNILPGLNITSGSEPKSSDKTHTGS

SEQ ID NO: 391 - protein, 37 aa, Artificial Sequence
  N-term extended E200+G4S linker+IgG hinge +GS linker
DFPGHNYTTRNILPGLNITSGGGGSEPKSSDKTHTGS

SEQ ID NO: 392 - protein, 42 aa, Artificial Sequence
  N-term and C term extended E200 + IgG hinge+GS linker
DFPGHNYTTRNILPGLNITSTFHKTSGSGKEPKSSDKTHTGS

SEQ ID NO: 393 - protein, 44 aa, Artificial Sequence
  N-term and C term extended E200 +GS linker+ IgG hinge+GS linker
DFPGHNYTTRNILPGLNITSTFHKTSGSGKGSEPKSSDKTHTGS

SEQ ID NO: 394 - protein, 47 aa, Artificial Sequence
  N-term and C term extended E200 + G4S linker+IgG hinge+GS linker
DFPGHNYTTRNILPGLNITSTFHKTSGSGKGGGGSEPKSSDKTHTGS

SEQ ID NO: 395 - protein, 35 aa, Artificial Sequence
  N-term extended E200+IgG hinge +G4S linker
DFPGHNYTTRNILPGLNITSEPKSSDKTHTGGGGS

SEQ ID NO: 396 - protein, 37 aa, Artificial Sequence
  N-term extended E200+GS linker+IgG hinge +G4S linker
DFPGHNYTTRNILPGLNITSGSEPKSSDKTHTGGGGS

SEQ ID NO: 397 - protein, 40 aa, Artificial Sequence
  N-term extended E200+G4S linker+IgG hinge +G4S linker
DFPGHNYTTRNILPGLNITSGGGGSEPKSSDKTHTGGGGS

SEQ ID NO: 398 - protein, 45 aa, Artificial Sequence
  N-term and C term extended E200 + IgG hinge+G4S linker
DFPGHNYTTRNILPGLNITSTFHKTSGSGKEPKSSDKTHTGGGGS

SEQ ID NO: 399 - protein, 47 aa, Artificial Sequence
  N-term and C term extended E200 +GS linker+ IgG hinge+G4S linker
DFPGHNYTTRNILPGLNITSTFHKTSGSGKGSEPKSSDKTHTGGGGS

SEQ ID NO: 400 - protein, 50 aa, Artificial Sequence
  N-term and C term extended E200 + G4S linker+IgG hinge+G4S linker
DFPGHNYTTRNILPGLNITSTFHKTSGSGKGGGGSEPKSSDKTHTGGGGS

SEQ ID NO: 401 - protein, 12 aa, Artificial Sequence
  Wild type IgG1 (v2)
EPKSCDKTHTCP

SEQ ID NO: 402 - protein, 12 aa, Artificial Sequence
  Wild type IgG3 (v2)
EPKSCDTPPPCP

SEQ ID NO: 403 - protein, 12 aa, Artificial Sequence
  Mutated IgG4
ESKYGPPSPSSP

SEQ ID NO: 404 - protein, 12 aa, Artificial Sequence
  Mutated IgG2
ERKSSVESPPSP

SEQ ID NO: 405 - protein, 12 aa, Artificial Sequence
  Mutated IgG3
EPKSSDTPPPSP

SEQ ID NO: 406 - protein, 12 aa, Artificial Sequence
  modified IgG1 hinge region
EPKSSDKTHTSP

1. A two component therapeutic comprising:
(a) an immune cell or progenitor thereof, expressing a receptor comprising an antigen-recognition domain and a signalling domain, wherein the antigen-recognition domain binds to a tumour-specific antigen expressed on a cell surface; and
(b) a bridging molecule comprising:
(i) a targeting moiety that binds to a cell surface molecule on a target cell; and
(ii) a tumour-specific antigen epitope moiety that is bound by the antigen recognition domain.

2. A two component therapeutic of claim 1, wherein the tumour-specific antigen is an antigen expressed on a solid tumour.

3. A two component therapeutic of claim 1, wherein the tumour-specific antigen is any one of nfP2X₇, EGFRvIII or CLDN6.

4. A two component therapeutic of claim 1, wherein the tumour-specific antigen epitope moiety is a dysfunctional P2X₇ receptor epitope moiety.

5.-6. (canceled)

7. The therapeutic according to claim 1, wherein the bridging molecule is a polypeptide, or antibody or antibody fragment.

8. The therapeutic according to claim 7, wherein the polypeptide is expressed by the immune cell or progenitor thereof.

9. (canceled)

10. An immune cell, or progenitor thereof comprising:
(i) a chimeric antigen receptor comprising an antigen-recognition domain that binds a first tumour antigen, preferably wherein the first tumour antigen is a dysfunctional P2X₇ receptor, and
(ii) an inducible expression construct encoding a bridging molecule in the form of a fusion protein comprising (a) an antibody, or antigen binding fragment thereof, that binds a second tumour antigen, and (b) a peptide or a fragment of the first tumour antigen, preferably the dysfunctional P2X₇ receptor.

11. A bridging molecule comprising:
(i) a targeting moiety that binds to a cell surface molecule on a target cell; and
(ii) a tumour-specific antigen epitope moiety, preferably a dysfunctional P2X₇ receptor epitope moiety, that is bound by an antigen recognition domain.

12. (canceled)

13. A nucleic acid comprising a nucleotide sequence encoding a bridging molecule as described in claim 1.

14. The nucleic acid of claim 13, wherein the nucleic acid comprises a first nucleotide sequence encoding the targeting moiety and a second nucleotide sequence encoding the tumour-specific antigen epitope moiety, preferably a dysfunctional P2X₇ receptor epitope moiety.

15. A vector or expression construct comprising a nucleic acid of claim 14.

16. (canceled)

17. A method of treating a disorder in a subject, the method comprising administering to the subject:
(a) a cell expressing a receptor comprising an antigen-recognition domain and a signalling domain, wherein the antigen-recognition domain binds to a tumour-specific antigen, preferably a dysfunctional P2X₇ receptor, expressed on a cell surface; and
(b) a bridging molecule comprising:
(i) a targeting moiety that binds to a cell surface molecule on a target cell; and
(ii) a tumour-specific antigen epitope moiety, preferably a dysfunctional P2X₇ receptor epitope moiety, that is bound by the antigen recognition domain,
thereby treating the disorder in the subject.

18. A method of treating a disorder of claim 17, wherein the disorder is cancer.

19. A method of killing a target cell, the method including exposing the target cell to:
(a) an immune cell expressing a receptor comprising an antigen-recognition domain and a signalling domain, wherein the antigen-recognition domain binds to a tumour-specific antigen, preferably a dysfunctional P2X₇ receptor, expressed on a cell surface; and
(b) a bridging molecule comprising:
(i) a targeting moiety that binds to a cell surface molecule on the target cell; and
(ii) a tumour-specific antigen epitope moiety, preferably a dysfunctional P2X₇ receptor epitope moiety, that is bound by the antigen recognition domain,
thereby killing the target cell.

20. The method of claim 19, wherein the target cell is a cancer cell, or a cell on which an MHC I or II molecule presents a peptide from an infectious agent.

21. The method of claim 19, wherein the target cell does not express dysfunctional P2X₇ receptor.

22. The method of claim 17, wherein 2 or more bridging molecules are administered to a subject, each bridging molecule comprising a targeting moiety that binds to a different cell surface molecule on a target cell.

23. (canceled)

24. The method of claim 17, wherein the bridging molecule is a polypeptide encoded by a nucleic acid sequence that is expressed by the immune cell expressing the chimeric antigen receptor.

25. (canceled)

26. The therapeutic of claim 1, wherein the bridging molecule comprises targeting moieties for more than one class of cell surface molecule on a target cell.

27. The therapeutic of claim 1, wherein the bridging molecule comprises targeting moieties for more than one epitope of the same cell surface molecule on a target cell.

28. The therapeutic of claim 1, wherein the antigen-recognition domain of the CAR binds to an epitope associated with an adenosine triphosphate (ATP)-binding site of the dysfunctional P2X₇ receptor.

29. The therapeutic of claim 28, wherein the dysfunctional P2X₇ receptor has a reduced capacity to bind ATP at the ATP-binding site compared to an ATP-binding capacity of a functional P2X₇ receptor.

30.-42. (canceled)

43. The therapeutic of claim 11, wherein the targeting moiety of the bridging molecule comprises a ligand or binding partner for a protein or receptor present on the target cell surface.

44.-49. (canceled)

50. The therapeutic of claim 1, wherein the cell surface molecule is a tumour-associated antigen.

51. The therapeutic of claim 50, wherein the tumour associated antigen is selected from the group consisting of: CD33 (Siglec-3), CD123 (IL3RA), CD135 (FLT-3), CD44 (HCAM), CD44V6, CD47, CD184 (CXCR4), CLEC12A (CLL1), LeY, FRp, MICA/B, CD305 (LAIR-1), CD366 (TIM-3), CD96 (TACTILE), CD133, CD56, CD29 (ITGB1), CD44 (HCAM), CD47 (IAP), CD66 (CEA), CD112 (Nectin2), CD117 (c-Kit), CD133, CD146 (MCAM), CD155 (PVR), CD171 (LI CAM), CD200 (OX-2), CD221 (IGF1), CD227 (MUC1), CD243 (MRD1), CD246 (ALK), CD271 (LNGFR), CD19, CD20, GD2, CD276, PSMA and EGFR.

52.-54. (canceled)

55. The therapeutic of claim 1, wherein the dysfunctional P2X₇ receptor epitope moiety is bound by an antibody that binds to dysfunctional P2X₇ receptors, but is not bound by antibodies which bind to functional P2X₇ receptors.

56. The therapeutic of claim 4, wherein the bridging molecule comprises 2 or more dysfunctional P2X₇ receptor epitope moieties.

57.-60. (canceled)
